(19) United States
(12) Patent Application Publication
(10) Pub. No.: US 2010/0047784 A1
(43) Pub. Date: Feb. 25, 2010

(54) Method for detecting nucleic acids

(75) Inventors: Gilad Shlomit, Ganei Hadar (IL); Esther Meiri, Shoham (IL); Noga Yerushalmi, Nes Tziona (IL)

Correspondence Address: FOLEY AND LARDNER LLP;SUITE 500, 3000 K STREET NW, WASHINGTON, DC, 20007, US

(73) Assignee: ROSETTA GENOMICS LTD.

(21) Appl. No.: 12/308,954

(22) PCT Filed: Jun. 29, 2007
(86) PCT No.: PCT/IB2007/003732

§ 371 Date: Apr. 2, 2009

Related U.S. Application Data
(60) Provisional application No. 60/806,404, filed on Jun. 30, 2006.
(60) Provisional application No. 60/822,371, filed on Aug. 14, 2006.
(60) Provisional application No. 60/850,455, filed on Oct. 10, 2006.
(60) Provisional application No. 60/871,095, filed on Dec. 20, 2006.

(51) Int. Cl. C12Q 1/68

(52) U.S. Cl. 435/6

(57) ABSTRACT

Described herein are methods and compositions for detecting, amplifying and labeling targeted nucleic acids, including microRNAs.

### FIELD OF THE INVENTION

[0001] The invention relates in general to methods and compositions for detecting, amplifying and labeling nucleic acid molecules, including microRNAs.

### BACKGROUND OF THE INVENTION

[0002] The identification and quantification of specific nucleic acid sequences has been an area of great interest in molecular biology over the past two decades. Expression profiles within the area of identification and quantification of specific nucleic acids is currently being intensely studied. The ability to identify and quantify certain nucleic acids and their products has advanced a broad range of disciplines, such as individualized medicine, and evaluation of drug resistance.

[0003] While much has been learned about various methods for identifying and quantifying specific nucleic acid sequences, these methods lack accuracy and precision for identifying small variations in nucleic acid sequences, resulting in a high level of false positives and an inability to broadly apply these methods. Methods for identifying target nucleic acids with specific single base polymorphisms have proven to be ineffective when these nucleic acids are present in a high background of other nucleic acids including nucleic acids with sequences similar to the target nucleic acids. Probe design has limited the number of different variable nucleic acids that can be identified at a time, and require controlled backgrounds of known nucleic acids. Probes associated with methods such as Real Time PCR for detecting particular nucleic acid variants including microRNAs (miRNAs) have also been problematic because of non-specific binding to RT primers and lack of sufficient sensitivity to the target sequences.

[0004] miRNAs are short RNA oligonucleotides of approximately 22 nucleotides that are involved in gene regulation. miRNAs regulate gene expression by targeting mRNAs for cleavage or translational repression. The role of miRNAs in the development and progression of disease has only recently become appreciated. Deregulated miRNA expression is implicated in onset and progression of different diseases including, but not limited to embryonic malformations and cancers.

[0005] As a result of their small size, miRNAs have been difficult to identify using standard methodologies. A limited number of miRNAs have been identified by extracting large quantities of RNA. miRNAs have also been identified that contribute to the presentation of visibly discernable phenotypes. Expression array data shows that miRNAs are expressed in different developmental stages or in different tissues.

[0006] Moreover, because of their potential broad use in treating and diagnosing different diseases, there is a need in the art (yet unmet) to develop methods of identification, isolation and also quatitation of miRNAs. The present invention addresses the need by disclosing efficient and sensitive methods and compositions for isolating and quantitating miRNAs from different samples, including those wherein there is only minimum amount of a starting material available.

### SUMMARY OF THE INVENTION

[0007] A method of detecting a target nucleic acid is provided. The method may comprise providing a sample comprising a target nucleic acid, wherein the target nucleic acid comprises a first portion and a second portion, and contacting the target nucleic acid with a probe. The probe may comprise a first portion complementary to the first portion of the target nucleic acid, and a second portion that is substantially complementary to the second portion of the target nucleic acid. The level of probe binding to the target nucleic acid may be compared to a control and may be indicative of the level of target nucleic acid present in the sample.

[0008] A method of detecting a target nucleic acid amongst one or more other nucleic acids is also provided. The method may comprise providing a sample comprising a target nucleic acid and a sibling nucleic acid, wherein the target nucleic acid comprises a first portion and a second portion, and the sibling nucleic acid comprises a first portion and a second portion. The method may further comprise contacting the target nucleic acid with a probe. The first portion of the target nucleic acid and first portion of the sibling nucleic acid are substantially identical. The first portion of the sibling nucleic acid is substantially complementary to the first portion of the probe. The second portion of the sibling nucleic acid is substantially complementary to the second portion of the probe. The level of probe binding to the target nucleic acid may be compared to a control and may be indicative of the level of target nucleic acid present in the sample.

[0009] A method of detecting a plurality of target nucleic acids in a sample is also provided. Each target nucleic acid may comprise a first portion and a second portion. The method may comprise providing a sample containing a plurality of target nucleic acids and contacting the target nucleic acids with a plurality of probes. The sample may also comprise a plurality of sibling nucleic acids. Each probe may be capable of distinguishing a target nucleic acid from a sibling nucleic acid in the sample. Each sibling nucleic acid comprises a first portion and a second portion. The first portion of the sibling nucleic acid is substantially complementary to the first portion of the sibling nucleic acid. Each probe of the method may comprise a first portion complementary to the first portion of one of the target nucleic acids and a second portion substantially complementary to the second portion of one of the target nucleic acids. The level of each probe binding to each target nucleic acid may be compared to a control is indicative of the level of each target nucleic acid present in the sample.

[0010] A method of detecting a target nucleic acid amongst one or more other sibling nucleic acids is also provided. The method may comprise providing a sample comprising a target nucleic acid comprise a first portion and second portion, and contacting the sample with a probe comprising a first portion and a second portion. The first portion of the target nucleic acid may comprise a variant site. The sibling nucleic acid may also comprise a first portion and second portion. The first portion of the sibling nucleic acid may also comprise a variant site. The variant site of the target nucleic acid may differ from the variant site of the sibling nucleic acid by as few as one nucleotide. The first portion of the probe may comprise a detection site that is complementary to the variant site of the target nucleic acid but is noncomplementary to the variant site of the sibling nucleic acid. The probe may also comprise a sensitizing site in the second portion that is substantially complementary to the second portion of both the target nucleic acid and the sibling nucleic acid. The probe may allow specific detection of the target nucleic acid in a diverse background of other substantially identical sibling nucleic acids ranging in concentration from low to high.

[0011] The target nucleic acid of the method may be mRNA, miRNA, pri-mRNA, pre-mRNA, siRNA, anti-miRNA, DNA, or cDNA. The target nucleic acid may be isolated from bacteria, viruses, animals, or humans. The target nucleic acid may be amplified. The amplification of the target nucleic acid may be by polymerase chain reaction using forward and reverse primers wherein the forward primer may comprise a sequence selected from the group consisting of any one of SEQ ID NOS: 4168-8334. The probe of the method may comprise a label, which may be fluorophore. The label may further comprise a quencher molecule. The fluorophore may be distal to the quencher molecule. The probe may comprise a sequence selected from the group consisting of any one of SEQ ID NOS: 8335-20835. The sample of the method may be a biological sample. The biological sample may be selected from the group consisting of blood, a blood fraction, amniotic fluid, urine, ascetic fluid, saliva, cerebrospinal fluid, cervical secretions, vaginal secretions, endometrial secretions, gastrointestinal secretions, bronchial secretions, sputum, pleural effusion, secretions from the breast, secretions from ovarian cyst, sperm, cell line and tissue sample.

[0012] A method for detecting a disease or condition is also provided. The method may comprise providing a sample wherein the sample has a target nucleic acid and a sibling nucleic acid. The method may further comprise contacting the target nucleic acid with a probe. The method may also comprise measuring a difference in the level of a target nucleic acid to a control, which is indicative of the disease or condition or the presence of a viral or bacterial infection. The disease or condition may be cancer, HIV, Hepatitis B or human papilloma virus infection.

[0013] A method for genotyping an individual is also provided. The method may comprise providing a sample where the sample has a target nucleic acid and a sibling nucleic acid. The method may further comprise contacting the target nucleic acid with a probe. The method may also comprise measuring the difference in the level of a target nucleic acid to a control, which is indicative of the genotype of the individual.

[0014] A method for identifying microRNA expression in a body-fluid sample obtained from a subject is also provided. The method may comprise providing RNA from said sample, wherein said RNA comprises a microRNA. The method may further comprise generating a reverse transcript of the polyadenylated RNA and amplifying the reverse transcript by polymerase chain reaction comprising a forward primer, a reverse primer, and a probe. The body-fluid sample is selected from the group consisting of: blood, serum, urine, amniotic fluid, ascitic fluid, saliva, cervical secretions, vaginal secretions, endometrial secretions, gastrointestinal secretions, bronchial secretions, sputum, pleural effusion, secretions from the breast, secretions from ovarian cyst, and sperm.

[0015] The forward primer may comprise a sequence selected from the group consisting of any one of SEQ ID NOS: 4168-8334. The probe may comprise a sequence selected from the group consisting of any one of SEQ ID NOS: 8335-20835.

[0016] A biochip is also provided. The biochip may comprise a plurality of probes. The probes may comprise negative probes, positive probes, spike probes, and test probes. A negative probe may comprise a nucleic acid substantially complementary to a miRNA*. The sequence of the nucleic acid may be selected from the group consisting of any one of SEQ ID NOS: 20863-20925. A positive probe may comprise a nucleic acid substantially complementary to a small RNA. The sequence of the nucleic acid may be selected from the group consisting of any one of SEQ ID NOS: 20926-20937. A spike probe may comprise a nucleic acid with a sequence that is not complementary to any sequence of 60 nucleotides in a genome which may be human, rat, virus or mouse. The sequence of the nucleic acid may be selected from the group consisting of any one of SEQ ID NOS: 20938-20951.

[0017] A test probe may comprise 40 to 60 nucleotides. A test probe may comprise a nucleic acid that is substantially complementary to a miRNA. The nucleic acid may comprise 16 to 29 nucleotides. The sequence of the nucleic acid may be selected from the group consisting of any one of SEQ ID NOS: 1-4167. The test probe may also comprise a linker. The linker may comprise a nucleic acid, wherein the sequence of the nucleic acid may be selected from the group consisting of any one of SEQ ID NOS: 20952-21063. Also provided is a method of detecting a nucleic acid. A biological sample may be provided. The biochip may be contacted with the biological sample. The level of a nucleic acid may be measured. A difference in the level of the nucleic acid compared to a control may be indicative the nucleic acid being detected in the biological sample. The nucleic acid may be a pri-miRNA, a pre-miRNA, or a miRNA. The nucleic acid may be labeled with a fluorophore.

[0018] A direct and robust way to label microRNAs (miRNAs) is also provided. Also provided are a methods for detecting and measuring relative levels of miRNAs using Luminex technology, and methods of calibrating the detection method. Luminex provides a “solution based biochip” method. The methods describer herein may be applied to other similar platforms

### BRIEF DESCRIPTION OF THE DRAWINGS

[0019] FIG. 1 is a schematic description of TaqMan miRNA assays. TaqMan-based real time quantification of miRNAs includes two steps, stem-loop reverse transcription (RT) and real time PCR. Stem-loop RT primers bind to the 3′ portion of miRNA molecules and are reverse transcribed with reverse transcriptase. Then, the RT product is quantified using conventional TaqMan PCR that includes miRNA-specific forward primer, reverse primer and a dye-labeled TaqMan probe. The purpose of tailed forward primer at 5′ is to increase its melting temperature (Tm) depending on the sequence composition of miRNA molecules.

[0020] FIG. 2 is a schematic of the method of Shi and Chiang (2005). Following total RNA extraction, a polyadenylation reaction is performed. Next, the products are reverse transcribed using a poly(T) adapter linked to a specific tail, creating cDNA. Following this stage, a real time PCR reaction is performed using SYBR Green as a fluorophore, enabling the quantification of product accumulation.

[0021] FIG. 3 is a schematic representation of a method of detection provided by the present invention. The target miRNA in this example is from the human let-7a family.

[0022] FIG. 4 is another schematic representation of a method of detection provided by the present invention, in which there is a base mismatch between the sequence introduced by the adaptor during reverse transcription of polyadenylated target nucleic acid and the probe. The target miRNA in this example is from the human let-7a family.

[0023] FIG. 5 is a schematic representation of the method for detecting a target nucleic acid. Three nucleic acids are represented, each comprising a first portion (marked by a “1”) and a second portion (marked by a “2”). A target nucleic acid is indicated by the letter T, a probe is indicated by the letter P, and a sibling nucleic acid is indicated by the letter S. A straight arrow drawn between two nucleic acid portions indicates that the sequences of the two portions are either identical or complementary. A dashed arrow drawn between two portions indicates that the sequences of the two portions are either substantially identical or substantially complementary. The first portions of the target nucleic acid and sibling nucleic acid are substantially identical, while the second portions of the target nucleic acid and sibling nucleic acid are identical. The second portions of the probe and the target nucleic acid are substantially complementary, as are the second portions of the probe and the sibling nucleic acid. This substantial complementarity allows the probe to distinguish the target nucleic acid from its sibling nucleic acid, because the first portion of the probe is identical to the first portion of the target nucleic acid, but only substantially complementary to the sibling nucleic acid.

[0024] FIG. 6 demonstrates the sensitivity of the Luminex assay as was measured using 5 different Spikes at increasing concentration. Labeling was done using the ULS technology and Ambion probe set was used for bead coupling. The system was found to be sensitive up to 0.06 fmol miRNA and is linear at 2 orders of magnitude. Results are presented on a logarithmic scale.

[0025] FIG. 7 demonstrates the sensitivity of the assay as was measured using a biotinilated spike at different concentration. Exiqon LNA probe set was used for bead coupling. The system was found to be sensitive up to 0.1 fmol miRNA and is linear in all the examined range, up to 10 fmol. Results are presented on a logarithmic scale.

[0026] FIG. 8 demonstrates the specificity as was tested using let-7a synthetic miRNA, which was labeled and hybridized with a mixture of bead coupled to different Let-7 family members. The specificity of the system is proportional and correlative to the similarity between the sequences, the number of mismatches, their position in the sequence and the nature of the mismatch (which nt is changed).

[0027] FIG. 9 shows the same specificity test as in FIG. 8 as was performed with increasing hybridization temperatures. Non specific let-7c binding is decreased dramatically with the increase in hybridization temperature, while the specific signal is just slightly affected.

[0028] FIG. 10 demonstrates the reproducibility of the labeling and the hybridization. Human placenta RNA was labeled and hybridized in two separate experiments.

[0029] FIG. 11 demonstrates the expression profile of 100 miRNA set. Human brain and placenta RNA from fresh tissue were labeled and hybridized to couple beads having LNA modified probes. miRNAs specific to brain or placenta were detect and are denoted on the figure. Results are presented on logarithmic scale.

[0030] FIG. 12 demonstrates the expression profile of 100 miRNA set. Human brain and placenta RNA from fresh tissue were labeled and hybridized to couple beads having non-modified probes from the Ambion probe set. miRNAs specific to brain or placenta were detect and are denoted on the figure. Results are presented on logarithmic scale.

[0031] FIG. 13 demonstrates miRNAs differential expression. The RNA was extracted from formalin fixed paraffin embedded lung (a) and bladder (b) normal and tumor tissues. miRNA expression profile was performed as described. Some miRNAs with differential expression are marked on the graph. Results are presented on logarithmic scale.

[0032] FIG. 14 demonstrates the Tyramide signal amplification (TSA) reaction as was performed onto 2 biotinilated spikes, one of which with increasing concentration (C1) and the other at a constant concentration (C2). The results of both signal; with and without TSA are presented.

[0033] Table 1 describes the sequences required for the detection of all miRNAs presented in release 8.2 of the Sanger Institute miRBase Sequence Database from all organisms. The columns of the table are as follows. “mRNA Name” identifies the Sanger miRNA that is the target nucleic acid. “Organism” indicates the name of the species in which the miRNA is found. “MID” indicates the SEQ ID NO of the miRNA. “FD-P” indicates the SEQ ID NO of the forward primer used to amplify the target nucleic acid, the sequence of which primer comprises the first 16 nucleotides of the miRNA (from the miRNA 5′ end) and a 5′ overhanging tail (CAGTCATTTGGG; SEQ ID NO: 20839). “Probe1” indicates the SEQ ID NO of the probe used in the polymerase chain reaction comprising the target nucleic acid and forward and reverse primers, the sequence of which probe comprises 8 nucleotides complementary to the 3′ end of the miRNA and 15 nucleotides complementary to the adaptor sequence added during a prior reverse transcription of the target miRNA. The 15 nucleotides complementary to the adaptor sequence are 5′-CCGTTTTTTTTTTTT-3′ (SEQ ID No: 20845). “Probe2” indicates the SEQ ID NO of a probe similar to “Probe1,” and differs from the Probe1 probe only by virtue of being shifted one nucleotide relative to the 5′ end of the miRNA. “Probe3” indicates the SEQ ID NO of a probe similar to “Probe2,” and differs from the Probe2 probe only by virtue of being shifted one nucleotide relative to the 5′ end of the miRNA.

### DETAILED DESCRIPTION

[0034] Provided herein are methods for detecting a target nucleic acid. The method comprising contacting the target nucleic acid with a probe that has at least one mismatch to the target nucleic acid. The mismatch may allow the probe to distinguish the target nucleic acid from other nucleic acids that are substantially identical to the target nucleic acid and that differ from the target nucleic acid by as few as one nucleotide. The ability of the probe to distinguish the target nucleic acid over other substantially identical nucleic acids may be due to the presence of at least one additional mismatch between the probe and the other substantially identical nucleic acids. The method may allow specific detection of a target nucleic acid in a diverse background of other substantially identical nucleic acids ranging in concentration from low to high.

[0035] Also provided are methods and compositions that may be useful, among other things, for diagnostic and prognostic purposes.

[0036] Other aspects of the invention will become apparent to the skilled artisan by the following description of the invention.

### 1. Definitions

[0037] Before the present materials and methods are disclosed and described, it is to be understood that the terminology used herein is for the purpose of describing particular embodiments only and is not intended to be limiting. It must be noted that, as used in the specification and the appended claims, the singular forms “a,” “an” and “the” include plural referents unless the context clearly dictates otherwise. For the recitation of numeric ranges herein, each intervening number there between with the same degree of precision is explicitly contemplated. For example, for the range of 6-9, the numbers 7 and 8 are contemplated in addition to 6 and 9, and for the range 6.0-7.0, the number 6.0, 6.1, 6.2, 6.3, 6.4, 6.5, 6.6, 6.7, 6.8, 6.9, and 7.0 are explicitly contemplated.

[0038] a. Animal

[0039] “Animal” as used herein may mean fish, amphibians, reptiles, birds, and mammals, such as mice, rats, rabbits, goats, cats, dogs, cows, apes and humans.

[0040] b. Anti-miRNA

[0041] “Anti-RNA” as used herein is a RNA that is capable of blocking the activity of a miRNA or miRNA*, such as by binding to the pri-miRNA, pre-miRNA, miRNA or miRNA* (e.g. antisense or RNA silencing), or by binding to the target binding site. The anti-miRNA may comprise a total of 5-100 or 10-60 nucleotides. The anti-miRNA may also comprise a total of at least 5-40 nucleotides. The sequence of the anti-miRNA may comprise (a) at least 5 nucleotides that are substantially complementary to the 5′ of a miRNA and at least 5-12 nucleotides that are substantially identical to the flanking regions of the target site from the 5′ end of the miRNA, for the purposes of binding to a miRNA and repressing its activity; or (b) at least 5-12 nucleotides that are substantially identical to the 3′of a miRNA and at least 5 nucleotide that are substantially complementary to the flanking region of the target site from the 3′ end of the miRNA, for the purposes of inhibiting the ability of a miRNA to bind to its target. The sequence of the anti-miRNA may comprise the sequence of a anti-miRNA disclosed in U.S. patent application Ser. Nos. 11/384,049, 11/418,870 or 11/429,720, the contents of which are incorporated herein, or variants thereof.

[0042] c. Attached

[0043] “Attached” or “immobilized” as used herein to refer to a probe and a solid support may mean that the binding between the probe and the solid support is sufficient to be stable under conditions of binding, washing, analysis, and removal. The binding may be covalent or non-covalent. Covalent bonds may be formed directly between the probe and the solid support or may be formed by a cross linker or by inclusion of a specific reactive group on either the solid support or the probe or both molecules. Non-covalent binding may be one or more of electrostatic, hydrophilic, and hydrophobic interactions. Included in non-covalent binding is the covalent attachment of a molecule, such as streptavidin, to the support and the non-covalent binding of a biotinylated probe to the streptavidin. Immobilization may also involve a combination of covalent and non-covalent interactions.

[0044] d. Biological Sample

[0045] “Biological sample” as used herein may mean a sample of biological tissue or fluid that comprises nucleic acids. Such samples include, but are not limited to, tissue or fluid isolated from animals. Biological samples may also include sections of tissues such as biopsy and autopsy samples, frozen sections taken for histologic purposes, hair, and skin. Biological samples also include explants and primary and/or transformed cell cultures derived from animal or patient tissues. Biological samples may also be blood, a blood fraction, plasma, serum, urine, pleural effusion, mucus, ascitic fluid, amniotic fluid, stool, tears, saliva, cerebrospinal fluid, cervical secretions, vaginal secretions, endometrial secretions, gastrointestinal secretions, bronchial secretions, sputum, secretions from ovarian cyst, sperm, secretions from the breast, cell line, or tissue sample. A biological sample may be provided by removing a sample of cells from an animal, but can also be accomplished by using previously isolated cells (e.g., isolated by another person, at another time, and/or for another purpose), or by performing the methods described herein in vivo. Archival tissues, such as those having treatment or outcome history (e.g., formalin fixed, paraffin-embedded (FFPE) tissues), may also be used.

[0046] e. Complement

[0047] “Complement” or “complementary” as used herein to refer to a nucleic acid may mean Watson-Crick (e.g., A-T/U and C-G) or Hoogsteen base pairing between nucleotides or nucleotide analogs of nucleic acid molecules.

[0048] f. Detection

[0049] “Detection” may mean detecting the presence of a component in a sample. Detection may also mean detecting the absence of a component. Detection may also mean measuring the level of a component, either quantitatively or qualitatively.

[0050] g. Differential Expression

[0051] “Differential expression” may mean qualitative or quantitative differences in the temporal and/or cellular gene expression patterns within and among cells and tissue. Thus, a differentially expressed gene may qualitatively have its expression altered, including an activation or inactivation, in, e.g., normal versus disease tissue. Genes may be turned on or turned off in a particular state, relative to another state thus permitting comparison of two or more states. A qualitatively regulated gene may exhibit an expression pattern within a state or cell type which may be detectable by standard techniques. Some genes may be expressed in one state or cell type, but not in both. Alternatively, the difference in expression may be quantitative, e.g., in that expression is modulated, either up-regulated, resulting in an increased amount of transcript, or down-regulated, resulting in a decreased amount of transcript. The degree to which expression differs need only be large enough to quantify via standard characterization techniques such as expression arrays, quantitative reverse transcriptase PCR, northern analysis, real-time PCR, and RNase protection.

[0052] h. Gene

[0053] “Gene” used herein may be a natural (e.g., genomic) or synthetic gene comprising transcriptional and/or translational regulatory sequences and/or a coding region and/or non-translated sequences (e.g., introns, 5′- and 3′-untranslated sequences). The coding region of a gene may be a nucleotide sequence coding for an amino acid sequence or a functional RNA, such as tRNA, rRNA, catalytic RNA, siRNA, miRNA or antisense RNA. A gene may also be an mRNA or cDNA corresponding to the coding regions (e.g., exons and miRNA) optionally comprising 5′- or 3′-untranslated sequences linked thereto. A gene may also be an amplified nucleic acid molecule produced in vitro comprising all or a part of the coding region and/or 5′- or 3′-untranslated sequences linked thereto.

[0054] i. Groove Binder/Minor Groove Binder (MGB)

[0055] “Groove binder” and/or “minor groove binder” may be used interchangeably and refer to small molecules that fit into the minor groove of double-stranded DNA, typically in a sequence-specific manner. Minor groove binders may be long, flat molecules that can adopt a crescent-like shape and thus, fit snugly into the minor groove of a double helix, often displacing water. Minor groove binding molecules may typically comprise several aromatic rings connected by bonds with torsional freedom such as furan, benzene, or pyrrole rings. Minor groove binders may be antibiotics such as netropsin, distamycin, berenil, pentamidine and other aromatic diamidines, Hoechst 33258, SN 6999, aureolic anti-tumor drugs such as chromomycin and mithramycin, CC-1065, dihydrocyclopyrroloindole tripeptide (DPI₃), 1,2-dihydro-(3H)-pyrrolo[3,2-e]indole-7-carboxylate (CDPI₃), and related compounds and analogues, including those described in Nucleic Acids in Chemistry and Biology, 2d ed., Blackburn and Gait, eds., Oxford University Press, 1996, and PCT Published Application No. WO 03/078450, the contents of which are incorporated herein by reference. A minor groove binder may be a component of a primer, a probe, a hybridization tag complement, or combinations thereof. Minor groove binders may increase the Tₘ of the primer or a probe to which they are attached, allowing such primers or probes to effectively hybridize at higher temperatures.

[0056] j. Identity

[0057] “Identical” or “identity” as used herein in the context of two or more nucleic acids or polypeptide sequences may mean that the sequences have a specified percentage of residues that are the same over a specified region. The percentage may be calculated by optimally aligning the two sequences, comparing the two sequences over the specified region, determining the number of positions at which the identical residue occurs in both sequences to yield the number of matched positions, dividing the number of matched positions by the total number of positions in the specified region, and multiplying the result by 100 to yield the percentage of sequence identity. In cases where the two sequences are of different lengths or the alignment produces one or more staggered ends and the specified region of comparison includes only a single sequence, the residues of single sequence are included in the denominator but not the numerator of the calculation. When comparing DNA and RNA, thymine (T) and uracil (U) may be considered equivalent. Identity may be performed manually or by using a computer sequence algorithm such as BLAST or BLAST 2.0.

[0058] k. Label

[0059] “Label” as used herein may mean a composition detectable by spectroscopic, photochemical, biochemical, immunochemical, chemical, or other physical means. For example, useful labels include ³²P, fluorescent dyes, electron-dense reagents, enzymes (e.g., as commonly used in an ELISA), biotin, digoxigenin, or haptens and other entities which can be made detectable. A label may be a fluorophore, such as described in U.S. Pat. No. 6,541,618, the contents of which are incorporated herein by reference. A label may also be a quencher molecule, which when in proximity to another label, may decrease the amount of detectable signal of the other label, such as described in U.S. Pat. No. 6,541,618, the contents of which are incorporated herein by reference. A label may be incorporated into nucleic acids and proteins at any position.

[0060] l. miRNA

[0061] “miRNA” used herein may mean an RNA sequence capable of inhibiting a mRNA sequence. mRNA may mean include miRNA* or a variant thereof. The miRNA sequence may comprise from 13-33, 18-24 or 21-23 nucleotides. The miRNA may also comprise a total of at least 5-40 nucleotides. The sequence of the miRNA may be the first 13-33 nucleotides of the pre-miRNA. The sequence of the miRNA may also be the last 13-33 nucleotides of the pre-miRNA. The sequence of the miRNA may comprise the sequence of a miRNA disclosed in U.S. patent application Ser. Nos. 11/384,049, 11/418,870 or 11/429,720, the contents of which are incorporated herein, or variants thereof.

[0062] m. Nucleic Acid

[0063] “Nucleic acid” or “oligonucleotide” or “polynucleotide” used herein may mean at least two nucleotides covalently linked together. The depiction of a single strand also defines the sequence of the complementary strand. Thus, a nucleic acid also encompasses the complementary strand of a depicted single strand. Many variants of a nucleic acid may be used for the same purpose as a given nucleic acid. Thus, a nucleic acid also encompasses substantially identical nucleic acids and complements thereof. A single strand provides a probe that may hybridize to a target sequence under stringent hybridization conditions. Thus, a nucleic acid also encompasses a probe that hybridizes under stringent hybridization conditions.

[0064] Nucleic acids may be single stranded or double stranded, or may contain portions of both double stranded and single stranded sequence. The nucleic acid may be DNA, both genomic and cDNA, RNA, or a hybrid, where the nucleic acid may contain combinations of deoxyribo- and ribo-nucleotides, and combinations of bases including uracil, adenine, thymine, cytosine, guanine, inosine, xanthine hypoxanthine, isocytosine and isoguanine. Nucleic acids may be synthesized as a single stranded molecule or expressed in a cell (in vitro or in vivo) using a synthetic gene. Nucleic acids may be obtained by chemical synthesis methods or by recombinant methods.

[0065] The nucleic acid may also be a RNA such as a mRNA, tRNA, shRNA, siRNA or Piwi-interacting RNA, or a pri-miRNA, pre-miRNA, miRNA, or anti-miRNA, as described in U.S. patent application Ser. No. 11/429,720, 11/384,049, 11/418,870, 11/429,720, International Application Nos. PCT/IB05/02352, and PCT/EB2005/002702, the contents of which are fully incorporated herein by reference.

[0066] A nucleic acid will generally contain phosphodiester bonds, although nucleic acid analogs may be included that may have at least one different linkage, e.g., phosphoramidate, phosphorothioate, phosphorodithioate, or O-methylphosphoroamidite linkages and peptide nucleic acid backbones and linkages. Other analog nucleic acids include those with positive backbones; non-ionic backbones, and non-ribose backbones, including those described in U.S. Pat. Nos. 5,235,033 and 5,034,506, which are incorporated by reference. Nucleic acids containing one or more non-naturally occurring or modified nucleotides are also included within one definition of nucleic acids. The modified nucleotide analog may be located for example at the 5′-end and/or the 3′-end of the nucleic acid molecule. Representative examples of nucleotide analogs may be selected from sugar- or backbone-modified ribonucleotides. It should be noted, however, that also nucleobase-modified ribonucleotides, i.e. ribonucleotides, containing a non-naturally occurring nucleobase instead of a naturally occurring nucleobase such as uridines or cytidines modified at the 5-position, e.g. 5-(2-amino)propyl uridine, 5-bromo uridine; adenosines and guanosines modified at the 8-position, e.g. 8-bromo guanosine; deaza nucleotides, e.g. 7-deaza-adenosine; O- and N-alkylated nucleotides, e.g. N6-methyl adenosine are suitable. The 2′-OH-group may be replaced by a group selected from H, OR, R, halo, SH, SR, NH₂, NHR, NR₂ or CN, wherein R is C₁-C₆ alkyl, alkenyl or alkynyl and halo is F, Cl, Br or I. Modified nucleotides also include nucleotides conjugated with cholesterol through, e.g., a hydroxyprolinol linkage as described in Krutzfeldt et al., Nature (Oct. 30, 2005), Soutschek et al., Nature 432:173-178 (2004), and U.S. Patent Publication No. 20050107325, which are incorporated herein by reference. Modified nucleotides and nucleic acids may also include locked nucleic acids (LNA), as described in U.S. Patent No. 20020115080, which is incorporated herein by reference. Additional modified nucleotides and nucleic acids are described in U.S. Patent Publication No. 20050182005, which is incorporated herein by reference. Modifications of the ribose-phosphate backbone may be done for a variety of reasons, e.g., to increase the stability and half-life of such molecules in physiological environments, to enhance diffusion across cell membranes, or as probes on a biochip. Mixtures of naturally occurring nucleic acids and analogs may be made; alternatively, mixtures of different nucleic acid analogs, and mixtures of naturally occurring nucleic acids and analogs may be made.

[0067] The nucleic acid may have a length of 10 to 30,000 nucleotides, 10-25,000 nucleotides, 10-20,000 nucleotides, 10-10,000 nucleotides, 10-5,000 nucleotides, 10-2,500 nucleotides, 10-1,000 nucleotides, 10-250 nucleotides, 10-100 nucleotides, and 10-50 nucleotides. The nucleic acid may have a length of at least 10, 11, 11, 12, 13, 14, 15, 16, 17, 18, 19, 20, 21, 22, 23, 24, 25-40, 40-70, 80-125, 125-175, 175-200, or 200-250 nucleotides.

[0068] n. Pre-mRNA

[0069] “Pre-mRNA” used herein may mean mRNA sequence comprising a miRNA and a miRNA*. The pre-miRNA sequence may comprise from 45-90, 60-80 or 60-70 nucleotides. The sequence of the pre-miRNA may also be that of a pri-miRNA excluding from 0-160 nucleotides from the 5′and 3′ ends of the pri-miRNA. The sequence of the pre-miRNA may comprise the sequence of a pre-miRNA disclosed in U.S. patent application Ser. Nos. 11/384,049, 11/418,870 or 11/429,720, the contents of which are incorporated herein, or variants thereof.

[0070] o. Pri-mRNA

[0071] “Pri-mRNA” used herein may mean mRNA sequence comprising a pre-miRNA, miRNA, and miRNA*. The sequence of the pri-miRNA may comprise variants thereof. The sequence of the pri-miRNA may comprise the sequence of a pri-miRNA disclosed in U.S. patent application Ser. Nos. 11/384,049, 11/418,870 or 11/429,720, the contents of which are incorporated herein, or variants thereof. The pri-miRNA sequence may comprise from 45-30,000, 50-25,000, 100-20,000, 1,000-1,500 or 80-100 nucleotides.

[0072] The pri-miRNA may form a hairpin structure. The hairpin may comprise first and second nucleic acid sequences that are substantially complementary. The first and second nucleic acid sequence may be from 37-50 nucleotides. The first and second nucleic acid sequence may be separated by a third sequence of from 8-12 nucleotides. The hairpin structure may have a free energy less than −25 Kcal/mole as calculated by the Vienna algorithm with default parameters, as described in Hofacker et al., Monatshefte f. Chemie 125: 167-188 (1994), the contents of which are incorporated herein. The hairpin may comprise a terminal loop of 4-20, 8-12 or 10 nucleotides. The pri-miRNA may comprise at least 19% adenosine nucleotides, at least 16% cytosine nucleotides, at least 23% thymine nucleotides and at least 19% guanine nucleotides.

[0073] p. Stringent Hybridization Conditions

[0074] “Stringent hybridization conditions” used herein may mean conditions under which a first nucleic acid sequence (e.g., probe) will hybridize to a second nucleic acid sequence (e.g., target), such as in a complex mixture of nucleic acids. Stringent conditions are sequence-dependent and will be different in different circumstances. Stringent conditions may be selected to be about 5-10° C. lower than the thermal melting point (Tₘ) for the specific sequence at a defined ionic strength pH. The Tₘ may be the temperature (under defined ionic strength, pH, and nucleic concentration) at which 50% of the probes complementary to the target hybridize to the target sequence at equilibrium (as the target sequences are present in excess, at Tₘ, 50% of the probes are occupied at equilibrium). Stringent conditions may be those in which the salt concentration is less than about 1.0 M sodium ion, such as about 0.01-1.0 M sodium ion concentration (or other salts) at pH 7.0 to 8.3 and the temperature is at least about 30° C. for short probes (e.g., about 10-50 nucleotides) and at least about 60° C. for long probes (e.g., greater than about 50 nucleotides). Stringent conditions may also be achieved with the addition of destabilizing agents such as formamide. For selective or specific hybridization, a positive signal may be at least 2 to 10 times background hybridization. Exemplary stringent hybridization conditions include the following: 50% formamide, 5×SSC, and 1% SDS, incubating at 42° C., or, 5×SSC, 1% SDS, incubating at 65° C., with wash in 0.2×SSC, and 0.1% SDS at 65° C.

[0075] q. Substantially Complementary

[0076] “Substantially complementary” used herein may mean that a first sequence is at least 50%, 55%, 60%, 65%, 70%, 75%, 80%, 85%, 90%, 95%, 97%, 98% or 99% identical to the complement of a second sequence over a region of 2, 3, 4, 5, 6, 7, 8, 9, 10, 11, 12, 13, 14, 15, 16, 17, 18, 19, 20-40, 40-60, 60-100, or more nucleotides, or that the two sequences hybridize under stringent hybridization conditions.

[0077] r. Substantially Identical

[0078] “Substantially identical” used herein may mean that a first and second sequence are at least 50%, 55%, 60%, 65%, 70%, 75%, 80%, 85%, 90%, 95%, 97%, 98% or 99% identical over a region of 2, 3, 4, 5, 6, 7, 8, 9, 10, 11, 12, 13, 14, 15, 16, 17, 18, 19, 20-40, 40-60, 60-100, or more nucleotides or amino acids, or with respect to nucleic acids, if the first sequence is substantially complementary to the complement of the second sequence.

[0079] s. Target Nucleic Acid

[0080] “Target nucleic acid” as used herein may mean a nucleic acid or variant thereof that may be bound by another nucleic acid. A target nucleic acid may be a DNA sequence. The target nucleic acid may be an RNA. The target nucleic acid may comprise a mRNA, tRNA, shRNA, siRNA or Piwi-interacting RNA, or a pri-miRNA, pre-miRNA, miRNA, or anti-miRNA. The target nucleic acid may comprise a target miRNA binding site or a variant thereof. One or more probes may bind the target nucleic acid. The target binding site may be comprise 5-100 or 10-60 nucleotides. The target binding site may comprise a total of 5, 6, 7, 8, 9, 10, 11, 12, 13, 14, 15, 16, 17, 18, 19, 20, 21, 22, 23, 24, 25, 26, 27, 28, 29, 30-40, 40-50, 50-60, 61, 62 or 63 nucleotides. The target site sequence may comprise at least 5 nucleotides of the sequence of a target miRNA binding site disclosed in U.S. patent application Ser. Nos. 11/384,049, 11/418,870 or 11/429,720, the contents of which are incorporated herein.

[0081] t. Variant

[0082] “Variant” as used herein to refer to a nucleic acid may mean (i) a portion of a referenced nucleotide sequence; (ii) the complement of a referenced nucleotide sequence or portion thereof; (iii) a nucleic acid that is substantially identical to a referenced nucleic acid or the complement thereof; or (iv) a nucleic acid that hybridizes under stringent conditions to the referenced nucleic acid, complement thereof, or a sequences substantially identical thereto.

### 2. Probes

[0083] A probe is provided herein. A probe may comprise a nucleic acid. The probe may have a length of from 8 to 500, 10 to 100 or 20 to 60 nucleotides. The probe may also have a length of at least 8, 9, 10, 11, 12, 13, 14, 15, 16, 17, 18, 19, 20, 21, 22, 23, 24, 25, 26, 27, 28, 29, 30, 35, 40, 45, 50, 60, 70, 80, 90, 100, 120, 140, 160, 180, 200, 220, 240, 260, 280 or 300 nucleotides. The probe may comprise a nucleic acid of 18-25 nucleotides.

[0084] A probe may be capable of binding to a target nucleic acid of complementary sequence through one or more types of chemical bonds, usually through complementary base pairing, usually through hydrogen bond formation. Probes may bind target sequences lacking complete complementarity with the probe sequence depending upon the stringency of the hybridization conditions. A probe may be single stranded or partially single and partially double stranded. The strandedness of the probe is dictated by the structure, composition, and properties of the target sequence. Probes may be directly labeled or indirectly labeled.

[0085] a. Linker Sequences

[0086] The probe may further comprise a linker. The linker may be 10-60 nucleotides in length. The linker may be 20-27 nucleotides in length. The linker may be of sufficient length to allow the probe to be a total length of 45-60 nucleotides. The linker may not be capable of forming a stable secondary structure, may not be capable of folding on itself, or may not be capable of folding on a non-linker portion of a nucleic acid contained in the probe. The sequence of the linker may not appear in the genome of the animal from which the probe non-linker nucleic acid is derived. The linker may be selected from a sequence in Table 2 (SEQ ID NOS: 20952-21063).

TABLE 2
The linker sequences

| | SEQ ID |
|---|---|
| Sequence | NO |
| GCAATGCTAGCTATTGCTTGCTATT | 20952 |
| GCAATGCTAGCTATTGCTTGCTAT | 20953 |
| GCAATGCTAGCTATTGCTTGCTA | 20954 |
| GCAATGCTAGCTATTGCTTGCT | 20955 |
| GCAATGCTAGCTATTGCTTGC | 20956 |
| GCAATGCTAGCTATTGCTTG | 20957 |
| GCAATGCTAGCTATTGCTT | 20958 |
| GCAATGCTAGCTATTGCT | 20959 |
| GCAATGCTAGCTATTGC | 20960 |
| GCAATGCTAGCTATTG | 20961 |
| GCAATGCTAGCTATT | 20962 |
| GCAATGCTAGCTAT | 20963 |
| GCAATGCTAGCTA | 20964 |
| GCAATGCTAGCT | 20965 |
| GCAATGCTAGC | 20966 |
| GCAATGCTAG | 20967 |
| GCAATGCTA | 20968 |
| GCAATGCT | 20969 |
| GCAATGC | 20970 |
| GCAATG | 20971 |
| GCAAT | 20972 |
| TATCCTACTATACGTATCACATAGCGTTCCGTATGTGGCCGGGATAGACCTAGCTTAAGC | 20973 |
| TATCCTACTATACGTATCACATAGCGTTCCGTATGTGGCCGGGATAGACCTAGCTTAAG | 20974 |
| TATCCTACTATACGTATCACATAGCGTTCCGTATGTGGCCGGGATAGACCTAGCTTAA | 20975 |
| TATCCTACTATACGTATCACATAGCGTTCCGTATGTGGCCGGGATAGACCTAGCTTA | 20976 |
| TATCCTACTATACGTATCACATAGCGTTCCGTATGTGGCCGGGATAGACCTAGCTT | 20977 |
| TATCCTACTATACGTATCACATAGCGTTCCGTATGTGGCCGGGATAGACCTAGCT | 20978 |
| TATCCTACTATACGTATCACATAGCGTTCCGTATGTGGCCGGGATAGACCTAGC | 20979 |
| TATCCTACTATACGTATCACATAGCGTTCCGTATGTGGCCGGGATAGACCTAG | 20980 |
| TATCCTACTATACGTATCACATAGCGTTCCGTATGTGGCCGGGATAGACCTA | 20981 |
| TATCCTACTATACGTATCACATAGCGTTCCGTATGTGGCCGGGATAGACCT | 20982 |
| TATCCTACTATACGTATCACATAGCGTTCCGTATGTGGCCGGGATAGACC | 20983 |
| TATCCTACTATACGTATCACATAGCGTTCCGTATGTGGCCGGGATAGAC | 20984 |
| TATCCTACTATACGTATCACATAGCGTTCCGTATGTGGCCGGGATAGA | 20985 |
| TATCCTACTATACGTATCACATAGCGTTCCGTATGTGGCCGGGATAG | 20986 |
| TATCCTACTATACGTATCACATAGCGTTCCGTATGTGGCCGGGATA | 20987 |
| TATCCTACTATACGTATCACATAGCGTTCCGTATGTGGCCGGGAT | 20988 |
| TATCCTACTATACGTATCACATAGCGTTCCGTATGTGGCCGGGA | 20989 |
| TATCCTACTATACGTATCACATAGCGTTCCGTATGTGGCCGGG | 20990 |
| TATCCTACTATACGTATCACATAGCGTTCCGTATGTGGCCGG | 20991 |
| TATCCTACTATACGTATCACATAGCGTTCCGTATGTGGCCG | 20992 |
| TATCCTACTATACGTATCACATAGCGTTCCGTATGTGGCC | 20993 |
| TATCCTACTATACGTATCACATAGCGTTCCGTATGTGGC | 20994 |
| TATCCTACTATACGTATCACATAGCGTTCCGTATGTGG | 20995 |
| TATCCTACTATACGTATCACATAGCGTTCCGTATGTG | 20996 |
| TATCCTACTATACGTATCACATAGCGTTCCGTATGT | 20997 |
| TATCCTACTATACGTATCACATAGCGTTCCGTATG | 20998 |
| TATCCTACTATACGTATCACATAGCGTTCCGTAT | 20999 |
| TATCCTACTATACGTATCACATAGCGTTCCGTA | 21000 |
| TATCCTACTATACGTATCACATAGCGTTCCGT | 21001 |
| TATCCTACTATACGTATCACATAGCGTTCCG | 21002 |
| TATCCTACTATACGTATCACATAGCGTTCC | 21003 |
| TATCCTACTATACGTATCACATAGCGTTC | 21004 |
| TATCCTACTATACGTATCACATAGCGTT | 21005 |
| TATCCTACTATACGTATCACATAGCGT | 21006 |
| TATCCTACTATACGTATCACATAGCG | 21007 |
| TATCCTACTATACGTATCACATAGC | 21008 |
| TATCCTACTATACGTATCACATAG | 21009 |
| TATCCTACTATACGTATCACATA | 21010 |
| TATCCTACTATACGTATCACAT | 21011 |
| TATCCTACTATACGTATCACA | 21012 |
| TATCCTACTATACGTATCAC | 21013 |
| TATCCTACTATACGTATCA | 21014 |
| TATCCTACTATACGTATC | 21015 |
| TATCCTACTATACGTAT | 21016 |
| TATCCTACTATACGTA | 21017 |
| TATCCTACTATACGT | 21018 |
| TATCCTACTATACG | 21019 |
| TATCCTACTATAC | 21020 |
| TATCCTACTAT | 21021 |
| TATCCTACTA | 21022 |
| TATCCTACT | 21023 |
| TATCCTAC | 21024 |
| TATCCTA | 21025 |
| TATCCT | 21026 |
| TATCC | 21027 |
| CGAACGATAACGGATCGTTACGATCGATAACGAACGATAA | 21028 |
| CGAACGATAACGGATCGTTACGATCGATAACGAACGATA | 21029 |
| CGAACGATAACGGATCGTTACGATCGATAACGAACGAT | 21030 |
| CGAACGATAACGGATCGTTACGATCGATAACGAACGA | 21031 |
| CGAACGATAACGGATCGTTACGATCGATAACGAACG | 21032 |
| CGAACGATAACGGATCGTTACGATCGATAACGAAC | 21033 |
| CGAACGATAACGGATCGTTACGATCGATAACGAA | 21034 |
| CGAACGATAACGGATCGTTACGATCGATAACGA | 21035 |
| CGAACGATAACGGATCGTTACGATCGATAACG | 21036 |
| CGAACGATAACGGATCGTTACGATCGATAAC | 21037 |
| CGAACGATAACGGATCGTTACGATCGATAA | 21038 |
| CGAACGATAACGGATCGTTACGATCGATA | 21039 |
| CGAACGATAACGGATCGTTACGATCGAT | 21040 |
| CGAACGATAACGGATCGTTACGATCGA | 21041 |
| CGAACGATAACGGATCGTTACGATCG | 21042 |
| CGAACGATAACGGATCGTTACGATC | 21043 |
| CGAACGATAACGGATCGTTACGAT | 21044 |
| CGAACGATAACGGATCGTTACGA | 21045 |
| CGAACGATAACGGATCGTTACG | 21046 |
| CGAACGATAACGGATCGTTAC | 21047 |
| CGAACGATAACGGATCGTTA | 21048 |
| CGAACGATAACGGATCGTT | 21049 |
| CGAACGATAACGGATCGT | 21050 |
| CGAACGATAACGGATCG | 21051 |
| CGAACGATAACGGATC | 21052 |
| CGAACGATAACGGAT | 21053 |
| CGAACGATAACGGA | 21054 |
| CGAACGATAACGG | 21055 |
| CGAACGATAACG | 21056 |
| CGAACGATAAC | 21057 |
| CGAACGATAA | 21058 |
| CGAACGATA | 21059 |
| CGAACGAT | 21060 |
| CGAACGA | 21061 |
| CGAACG | 21062 |
| CGAAC | 21063 |

[0087] b. Test Probe

[0088] The probe may be a test probe. The test probe may comprise a nucleic acid sequence that is complementary to a miRNA, a miRNA*, a pre-miRNA, or a pri-miRNA. The sequence of the test probe may be selected from a sequence in Table 3 (SEQ ID NOs: 1-4167).

[0089] c. Negative Probe

[0090] The probe may be a negative probe. The negative probe may comprise a nucleic acid sequence that is not present in the biological sample. The negative probe may be complementary to a miRNA*. The sequence of the negative probe may be selected from a sequence in Table 4 (SEQ ID NOs: 20863-20925).

TABLE 4
The Negative Control Probes

| SEQUNCE | SEQ ID NO |
|---|---|
| TGGAATGTAAAGAAGTATGTA | 20863 |
| AACCCGTAGATCCGAACTTGTG | 20864 |
| TACAGTACTGTGATAACTGAAG | 20865 |
| AGCAGCATTGTACAGGGCTATGA | 20866 |
| TCAAATGCTCAGACTCCTGT | 20867 |
| AAAAGTGCTTACAGTGCAGGTAGC | 20868 |
| TAAAGTGCTGACAGTGCAGAT | 20869 |
| AGCAGCATTGTACAGGGCTATCA | 20870 |
| TACCCTGTAGATCCGAATTTGTG | 20871 |
| TACCCTGTAGAACCGAATTTGT | 20872 |
| TGGAGTGTGACAATGGTGTTTGT | 20873 |
| TTAAGGCACGCGGTGAATGCCA | 20874 |
| TCCCTGAGACCCTTTAACCTGTG | 20875 |
| TCCCTGAGACCCTAACTTGTGA | 20876 |
| CATTATTACTTTTGGTACGCG | 20877 |
| TCGTACCGTGAGTAATAATGC | 20878 |
| TCACAGTGAACCGGTCTCTTTT | 20879 |
| TCACAGTGAACCGGTCTCTTTC | 20880 |
| CTTTTTGCGGTCTGGGCTTGC | 20881 |
| CAGTGCAATGTTAAAAGGGCAT | 20882 |
| CAGTGCAATGATGAAAGGGCAT | 20883 |
| TAACAGTCTACAGCCATGGTCG | 20884 |
| TTGGTCCCCTTCAACCAGCTGT | 20885 |
| TTGGTCCCCTTCAACCAGCTA | 20886 |
| TGTGACTGGTTGACCAGAGGG | 20887 |
| TATGGCTTTTTATTCCTATGTGA | 20888 |
| TATGGCTTTTCATTCCTATGTG | 20889 |
| ACTCCATTTGTTTTGATGATGGA | 20890 |
| TATTGCTTAAGAATACGCGTAG | 20891 |
| AGCTGGTGTTGTGAATC | 20892 |
| TCTACAGTGCACGTGTCT | 20893 |
| AGTGGTTTTACCCTATGGTAG | 20894 |
| TAACACTGTCTGGTAAAGATGG | 20895 |
| TGTAGTGTTTCCTACTTTATGGA | 20896 |
| CATAAAGTAGAAAGCACTAC | 20897 |
| TGAGATGAAGCACTGTAGCTCA | 20898 |
| TACAGTATAGATGATGTACTAG | 20899 |
| GTCCAGTTTTCCCAGGAATCCCTT | 20900 |
| TGAGAACTGAATTCCATGGGTT | 20901 |
| TGAGAACTGAATTCCATAGGCT | 20902 |
| GTGTGTGGAAATGCTTCTGC | 20903 |
| TCAGTGCACTACAGAACTTTGT | 20904 |
| TCAGTGCATCACAGAACTTTGT | 20905 |
| TCTGGCTCCGTGTCTTCACTCC | 20906 |
| TCTCCCAACCCTTGTACCAGTG | 20907 |
| ACTAGACTGAAGCTCCTTGAGG | 20908 |
| TCAGTGCATGACAGAACTTGGG | 20909 |
| TTGCATAGTCACAAAAGTGA | 20910 |
| AATCATACACGGTTGACCTATT | 20911 |
| TAGGTTATCCGTGTTGCCTTCG | 20912 |
| TTAATGCTAATCGTGATAGGGG | 20913 |
| TAGCAGCACATAATGGTTTGTG | 20914 |
| TAGCAGCACATCATGGTTTACA | 20915 |
| TAGCAGCACGTAAATATTGGCG | 20916 |
| ACTGCAGTGAAGGCACTTGT | 20917 |
| CAAAGTGCTTACAGTGCAGGTAGT | 20918 |
| AACATTCAACGCTGTCGGTGAGT | 20919 |
| AACATTCATTGCTGTCGGTGGG | 20920 |
| AACATTCAACCTGTCGGTGAGT | 20921 |
| AACATTCATTGTTGTCGGTGGGTT | 20922 |
| TGGTTCTAGACTTGCCAACTA | 20923 |
| TTTGGCAATGGTAGAACTCACA | 20924 |
| TATGGCACTGGTAGAATTCACTG | 20925 |

[0091] d. Positive Probe

[0092] The probe may be a positive probe. The positive probe may be complementary to a small RNA. The small RNA may be present in an animal cell, such as a mammalian cell. The small RNA may be less than 200 nucleotides in length. The small RNA may be a ribosomal RNA. The sequence of the nucleic acid may be selected from a sequence in Table 5 (SEQ ID NOS: 20926-20937).

TABLE 5
The Positive Control Probes

| SEQUNCE | SEQ ID NO |
|---|---|
| TCAGAACGTGACAATCAGCACTAGCTATTGCTTGCTATT | 20926 |
| CAGTGAAGCAATGGCAATACTAGCTATTGCTTGCTATT | 20927 |
| TGCATCAGCGATCTTGGTGGTTAGCTATTGCTTGCTATT | 20928 |
| CTTCACTTACTGTCAGTAGCATAGCTATTGCTTGCTATT | 20929 |
| GAATTTGCGTGTCATCCTTGCGTAGCTATTGCTTGCTATT | 20930 |
| GAACCACCTCAGTAGTGTCTGTAGCTATTGCTTGCTATT | 20931 |
| GGTCAGAGCGCTGCGGTGATGTAGCTATTGCTTGCTATT | 20932 |
| AGACCTTCATGTTCAGTCAGCTAGCTATTGCTTGCTATT | 20933 |
| GCTAGCGCTGCGTTCTTCATCTAGCTATTGCTTGCTATT | 20934 |
| GCTTCCGAGATCAGACGAGATCTAGCTATTGCTTGCTATT | 20935 |
| TCTGTATCGTTCCAATTTAATGCTAGCTATTGCTTGCTATT | 20936 |
| GCGTGTCATCCTTGCGAATGCTAGCTATTGCTTGCTATT | 20937 |

[0093] e. Spike Probe

[0094] The probe may be a spike probe. The spike probe may comprise a sequence that is not complementary to 20-100 consecutive nucleotides (e.g., 60) in a genome. The genome may be an animal genome or viral genome. The animal may be human, mouse or rat. The sequence of the spike probe may be selected from a sequence listed in Table 6 (SEQ ID NOS: 20938-20951).

TABLE 6
The Spikes

| | SEQ |
|---|---|
| SEQUNCE | ID NO |
| TATTATGCGCGTAGCGTACCGAATGCTAGCTATTGCTTGCTATT | 20938 |
| CGCGCATAATATCGGTACGCTAATGCTAGCTATTGCTTGCTATT | 20939 |
| CGAATCGCGTATATTATGCGCGATGCTAGCTATTGCTTGCTATT | 20940 |
| TTACGCGTACCTATATCGACCCATGCTAGCTATTGCTTGCTATT | 20941 |
| CGTCGACTATCTATATCGACCCATGCTAGCTATTGCTTGCTATT | 20942 |
| TATCGCGAACTCGCCCTATAACATGCTAGCTATTGCTTGCTATT | 20943 |
| ATATAAGTTCGTATAACTATCGATGCTAGCTATTGCTTGCTATT | 20944 |
| CGATTAGTATACGAACTTATATATGCTAGCTATTGCTTGCTATT | 20945 |
| CGTTTCGTACGTCGTCGATTCGATGCTAGCTATTGCTTGCTATT | 20946 |
| CGAATCGACGACGCGCATAATAATGCTAGCTATTGCTTGCTATT | 20947 |
| TTAGTATCGAATACTAATCGATATGCTAGCTATTGCTTGCTATT | 20948 |
| CGATTAGTATACGAACTTATATATGCTAGCTATTGCTTGCTATT | 20949 |
| ATATAAGTTCGTATAACTATCGATGCTAGCTATTGCTTGCTATT | 20950 |
| TTAGTATCGAATTCGATACTAAATGCTAGCTATTGCTTGCTATT | 20951 |

### 3. Biochip

[0095] A biochip is also provided. The biochip may comprise a solid substrate comprising an attached probe or plurality of probes described herein. The probes may be capable of hybridizing to a target sequence under stringent hybridization conditions. The probes may be attached at spatially defined address on the substrate. More than one probe per target sequence may be used, with either overlapping probes or probes to different sections of a particular target sequence. The probes may be capable of hybridizing to target sequences associated with a single disorder. The biochip may comprise a negative probe, a positive probe, a spike probe, a test probe, or a combination thereof.

[0096] The probes may be attached to the biochip in a wide variety of ways, as will be appreciated by those in the art. The probes may either be synthesized first, with subsequent attachment to the biochip, or may be directly synthesized on the biochip.

[0097] The solid substrate may be a material that may be modified to contain discrete individual sites appropriate for the attachment or association of the probes and is amenable to at least one detection method. Representative examples of substrates include glass and modified or functionalized glass, plastics (including acrylics, polystyrene and copolymers of styrene and other materials, polypropylene, polyethylene, polybutylene, polyurethanes, Teflon J, etc.), polysaccharides, nylon or nitrocellulose, resins, silica or silica-based materials including silicon and modified silicon, carbon, metals, inorganic glasses and plastics. The substrates may allow optical detection without appreciably fluorescing.

[0098] The substrate may be planar, although other configurations of substrates may be used as well. For example, probes may be placed on the inside surface of a tube, for flow-through sample analysis to minimize sample volume. Similarly, the substrate may be flexible, such as a flexible foam, including closed cell foams made of particular plastics.

[0099] The biochip and the probe may be derivatized with chemical functional groups for subsequent attachment of the two. For example, the biochip or probe may be derivatized with a chemical functional group including, but not limited to, aldehyde groups, amine groups, amino groups, carboxyl groups, epoxy, oxo groups or thiol groups. Using these functional groups, the probes may be attached using functional groups on the probes either directly or indirectly using a linkers. The probes may be attached to the solid support by either the 5′terminus, 3′terminus, or via an internal nucleotide. The probe may comprise a functional group, which may be a 5′amino modifier C12 or a 3′amino modifier C6.

[0100] The probe may also be attached to the solid support non-covalently. For example, biotinylated oligonucleotides can be made, which may bind to surfaces covalently coated with streptavidin, resulting in attachment. Alternatively, probes may be synthesized on the surface using techniques such as photopolymerization and photolithography.

### 4. Method for Detecting a Target Nucleic Acid

[0101] A method is provided herein for detecting a target nucleic acid. FIG. 5 is a schematic representation of the method. The method may comprise using a probe (hereafter, “the probe”) to specifically detect and distinguish a target nucleic acid (hereafter, “the target nucleic acid”) from a substantially identical nucleic acid (hereafter, “the sibling nucleic acid”), wherein the sibling nucleic acid may differ from the target nucleic acid at a site that may include as few as one nucleotide (hereafter, “the variant site”).

[0102] The probe, the target nucleic acid, and the sibling nucleic acid may each comprise a first portion and a second portion. The first portions of the target nucleic acid, the sibling nucleic acid, and the probe may all be located on the 5′ end of each respective nucleic acid, or they may all be located on the 3′ end of each respective nucleic acid. Conversely, the second portion of the target nucleic acid, the sibling nucleic acid, and the probe may all be located on the 3′ end of each respective nucleic acid, or they may all be on the 5′ of each respective nucleic acid. The methods provided herein are based upon the strength of hybridization between the two portions of the probe and the corresponding two portions of the target nucleic acid, and between the two portions of the probe and the corresponding two portions of the sibling nucleic acid.

[0103] a. Target Nucleic Acid and Sibling Nucleic Acid

[0104] The first portion of the target nucleic acid may be substantially identical in sequence to the first portion of the sibling nucleic acid, differing at the variant site by as few as one nucleotide. The second portion of the target nucleic acid may be identical in sequence to the second portion of the sibling nucleic acid.

[0105] b. Interaction Between the Probe and the Target Nucleic Acid

[0106] The first portion of the probe and the first portion of the target nucleic acid may be complementary. The second portion of the probe and the second portion of the target nucleic acid may also be substantially complementary.

[0107] c. Interaction Between the Probe and the Sibling Nucleic Acid

[0108] The first portion of the probe and the first portion of the sibling nucleic acid may be substantially complementary. The second portion of the probe and the second portion of the sibling nucleic acid may be substantially complementary.

[0109] d. Distinguishing the Target Nucleic Acid from the Sibling Nucleic Acid Using the Probe

[0110] While not being bound by theory, the substantial complementarity between the second portion of the probe and the second portion of the sibling nucleic acid may sensitize the probe to a mismatch between the first portion of the probe and the first portion of the sibling nucleic acid causing an overall effect of less efficient hybridization between the probe and the sibling nucleic acid. In contrast, the substantial complementarity between the second portion of the probe and the second portion of the target nucleic acid may cause the first portion of the probe to more efficiently bind to the complementary first portion of the target nucleic acid. The substantial complementarity between the first and second portions of the probe and sibling nucleic acid may result in an overall weaker hybridization between the probe and the sibling target nucleic acid compared to the hybridization between the probe and the target nucleic acid. The probe may thus specifically detect the target nucleic acid (of which the first portion is complementary to the first portion of the probe) and distinguish the target nucleic acid from the sibling nucleic acid. A method described herein may allow specific detection of the target nucleic acid in a diverse background of other substantially identical nucleic acids ranging in concentration from low to high.

[0111] e. Target Nucleic Acid

[0112] A method is provided herein for detecting a target nucleic acid in a sample, wherein the target nucleic acid may comprise a first portion and a second portion. The target nucleic acid may comprise an adaptor sequence. Adaptor sequences are well known in the art to be used for detecting and amplifying nucleic acids, such as in polymerase chain reactions.

[0113] f. Sibling Nucleic Acid

[0114] A method is provided herein for detecting a target nucleic acid, wherein the target nucleic acid may be distinguished from a sibling nucleic acid. The sibling nucleic acid may comprise a first portion and a second portion. The second portion of the sibling nucleic acid may be identical to the second portion of the target nucleic acid. The first portion of the sibling nucleic acid may be substantially identical to the first portion of the target nucleic acid. The first portion of the sibling nucleic acid may also comprise a variant site.

[0115] g. Variant Site

[0116] The first portion of the target nucleic acid may comprise a variant site. The first portion of the sibling nucleic acid may also comprise a variant site. The variant site may differ between the target nucleic acid and the sibling nucleic acid. The variant site may also differ among substantially identical sibling nucleic acids. The variant site may comprise by as few as one nucleotide. The variant site of the target nucleic acid may differ from the variant site of the nucleic acid by as few as one nucleotide.

[0117] (1) Gene Families

[0118] The target nucleic acid and the sibling nucleic acid may be members of the same gene family. The gene family may comprise a plurality of genes. The genes may be evolutionarily related (i.e., share a common ancestral gene). The genes may share common sequence motifs and structures. The genes may also be substantially identical in sequence. The sequences may comprise a variant site, which may differ among the genes of a gene family.

[0119] The genes may be RNA genes, which may encode ribozymes, rRNA, tRNAs, or miRNAs. For example, the human genes encoding miRNAs Let-7a and Let-7c differ in sequence by one nucleotide.

[0120] The gene family may also be a collection of genes encoding at least one polypeptide domain whose amino acid sequences have at least 25% sequence identity over a comparison window of at least 20 amino acids. Such domains may be related through common ancestry as a result of gene duplication or evolution. Many polypeptide domains are known in the art including, for example, the EGF domain, the immunoglobulin domain, the fibronectin type III domain, the cadherin-like domain, death effector domains (DED).

[0121] The gene family may encode polypeptides sharing at least one highly conserved region. Two polypeptides share a “highly conserved region” if the polypeptides have a sequence identity of at least 60% over a comparison window of five amino acids, or if they share a sequence identity of at least 50% over a comparison window of ten amino acids.

[0122] (2) Polymorphisms

[0123] The variant site may comprise a polymorphism. “Polymorphism” as used herein may mean the occurrence of two or more genetically determined alternative sequences or alleles in a population. The polymorphism may comprise one nucleotide (i.e., comprise a single nucleotide polymorphism, or SNP), which may be an A, C, G, T, or U. The polymorphism may also comprise a small insertion or deletion. The polymorphism may be associated with or cause a disease or condition. The polymorphism may also be associated with the response of an individual to an agent such as a pharmacotherapeutic. The polymorphism may occur in a coding or noncoding region of a gene, or in an intergenic region between genes. The polymorphism may be a mutation. The mutation may be a nonsynonymous (i.e., silent), or synonymous (e.g., missense, asense, or nonsense) mutation. The mutation may also result in a change in the splicing or regulation of a gene.

[0124] A polymorphic marker or site is the locus at which divergence occurs. Markers may have at least two alleles, each occurring at frequency of greater than 1%, and may occur at a frequency greater than 10% or 20% of a selected population. A polymorphism may comprise one or more base changes, an insertion, a repeat, or a deletion. A polymorphic locus may be as small as one base pair. Polymorphic markers may include restriction fragment length polymorphisms, variable number of tandem repeats (VNTRs), hypervariable regions, minisatellites, dinucleotide repeats, trinucleotide repeats, tetranucleotide repeats, simple sequence repeats, and insertion elements such as Alu. The first identified allelic form is arbitrarily designated as the reference form and other allelic forms are designated as alternative or variant alleles. The allelic form occurring most frequently in a selected population is sometimes referred to as the wild type form. Diploid organisms may be homozygous or heterozygous for allelic forms. A diallelic polymorphism has two forms. A triallelic polymorphism has three forms. Single nucleotide polymorphisms (SNPs) may be included in polymorphisms.

[0125] Single nucleotide polymorphism (SNPs) are positions at which two alternative bases occur at appreciable frequency (>1%) in the human population, and are the most common type of human genetic variation. The site may be preceded by and followed by highly conserved sequences of the allele (e.g., sequences that vary in less than 1/100 or 1/1000 members of the populations). A single nucleotide polymorphism may arise due to substitution of one nucleotide for another at the polymorphic site. A transition is the replacement of one purine by another purine or one pyrimidine by another pyrimidine. A transversion is the replacement of a purine by a pyrimidine or vice versa. Single nucleotide polymorphisms may also arise from a deletion of a nucleotide or an insertion of a nucleotide relative to a reference allele.

[0126] h. Probe

[0127] A method for detecting a target nucleic acid is provided herein wherein a probe specifically detects a target nucleic acid. The probe may comprise a first and second portion. The first portion of the probe may be complementary to the first portion of a target nucleic aid. The second portion of the probe may be substantially complementary to the second portion of the target nucleic acid. The probe may comprise 5, 6, 7, 8, 9, 10, 11, 12, 13, 14, 15, 16, 17, 18, 19, 20, 21, 22, 23, 24, 25, 26, 27, 28, 29, 30, 31, 32, 33, 34, 35, 40, 45, 50, 55, 60, 65, 70, 75, 80, 85, 90, 95, or 100 nucleotides that are complementary to the target nucleic acid. The probe may also be substantially complementary to the sibling nucleic acid. The probe may comprise 5, 6, 7, 8, 9, 10, 11, 12, 13, 14, 15, 16, 17, 18, 19, 20, 21, 22, 23, 24, 25, 26, 27, 28, 29, 30, 31, 32, 33, 34, 35, 40, 45, 50, 55, 60, 65, 70, 75, 80, 85, 90, 95, or 100 nucleotides that are complementary to the sibling nucleic acid.

[0128] The probe may have a melting temperature of 68-70° C. The probe may be used in an amplifying reaction. The reaction may be PCR. The PCR reaction may comprise a forward primer, a reverse primer, and the probe. The PCR reaction may comprise the probe and a reverse primer bound to the target nucleic acid in a complex wherein the 5′ end of the probe may be located 5, 6, 7, 8, 9, 10 or 11 nucleotides upstream relative to the 3′ end of the reverse primer.

[0129] The probe may also comprise a label. The probe may also comprise more than 2 nucleic acids. The probe may also comprise a minor groove binder.

[0130] (1) Detection Site

[0131] The first portion of the probe may comprise a detection site. The detection site may comprise one nucleotide. The detection site may also comprise a plurality of nucleotides. The detection site may be complementary to the variant site of a target nucleic acid. The detection site may also be noncomplementary to the variant site of the sibling nucleic. The detection site may be located at either the 5′ end or the 3′ end of the probe. For example, the detection site may be 2, 3, 4, 5, 6, 7 or 8 bases from the 5′ end of the probe, or the detection site may be 2, 3, 4, 5, 6, 7, or 8 bases from the 3′ end of the probe. The detection site may be 8-10 nucleotides complementary to the target nucleic acid.

[0132] (2) Sensitizing Site

[0133] The second portion of the probe may comprise a sensitizing site. The sensitizing site may be noncomplementary to a target nucleic acid. The sensitizing site may also be noncomplementary to the sibling nucleic acid. The sensitizing site may be distal to the detection site. The sensitizing site may sensitize the probe to an additional mismatch between the probe and the first portion of the sibling nucleic acid causing an overall effect of less efficient hybridization between the probe and the sibling nucleic acid. In contrast, the sensitizing site of the probe may cause the first portion of the probe to efficiently bind to the complementary first portion of the target nucleic acid for an overall effect of more efficient hybridization between the probe and the target nucleic acid. The sensitizing site may be located at any site position of the probe including the 5′ end, the 3′ end or anywhere in between the ends of the probe, but distal to the detection site. The sensitizing site may comprise one nucleotide. The sensitizing site may also comprise a plurality of nucleotides. The sensitizing site may comprise 1-20 nucleotides. The sensitizing site may also comprise a poly(A) binding region. The poly(A) binding region may be complementary to the poly(A) of a cDNA.

[0134] i. Background Nucleic Acid

[0135] Also provided herein is a method of specifically detecting a target nucleic acid and distinguishing the target nucleic acid from a background nucleic acid. The background nucleic acid may comprise a plurality of nucleic acids. The background nucleic acid may comprise a sibling nucleic acid. The background nucleic acid may also comprise a diversity of non-target nucleic acids and non-sibling nucleic acids. The background nucleic acid may be neither identical nor substantially identical to the target nucleic acid.

### 5. Methods of Making a Target Nucleic Acid

[0136] Methods of making a target nucleic acid are also provided. The target nucleic acid may comprise an adaptor sequence that is located in the second portion of the target nucleic acid. The adaptor sequence may be used to generate noncomplementarity between the second portion of a target nucleic acid and the second portion of a probe. The adaptor sequence may comprise a sequence that is non-complementary to the sensitizing site.

[0137] The adaptor sequence may comprise 12-30 nucleotides. The adaptor sequence may comprise a synthetic sequence. The adaptor sequence may also comprise a sequence that is nonidentical to any sequence in the genome of the animal from which the target nucleic acid is isolated. The adaptor sequence may be ligated to the target nucleic acid. The adaptor sequence may be added to the target nucleic acid by PCR. The PCR may comprise an adaptor primer comprising a sequence complementary to the adaptor sequence. The adaptor sequence may also comprise a poly(A) sequence.

[0138] a. Method of Generating a Target Nucleic Acid from RNA

[0139] (1) RNA Extraction/Polyadenylation

[0140] The target nucleic acid may be RNA. Methods for isolating and amplifying the target sequences of RNA include total RNA extraction, a polyadenylation reaction, and a reverse transcription (RT) reaction. The target RNA may be mRNA, tRNA, shRNA, siRNA, Piwi-interacting RNA, pri-miRNA, pre-miRNA, miRNA, or anti-miRNA. The RNA may be polyadenylated. Polyadenylation may be generated by a poly(A) polymerase. Polyadenylation may also be generated by using a poly(A) tailing kit. Polyadenylation may also be by the method of Shi and Chiang (Biotechniques, 2005; 39(4):519-25), the contents of which are incorporated herein by reference. Polyadenylation may add 8, 9, 10, 11, 12, 13, 14, 15, 16, 17, 18, 19, 20, 30, 40, 50, 60, 70, 80, 90, 100, 110, 120, 130, 140, 150, 160, 170, 180, 190, 200, 210, 220, 230, 240, or 250 adenosines to the target nucleic acid.

[0141] (2) Reverse Transcription

[0142] Target sequences of a cDNA may be generated by reverse transcription of the target RNA. Methods for generating cDNA may be reverse transcribing polyadenylated RNA or alternatively, RNA with a ligated adaptor sequence. The cDNA may be synthesized according to methods outlined in U.S. patent Ser. No. 11/384,049, the contents of which are incorporated herein by reference.

[0143] (a) Reverse Transcription Using Adaptor Sequence Ligated to RNA

[0144] The RNA may be ligated to an adapter sequence prior to reverse transcription. A ligation reaction may be performed by T4 RNA ligase to ligate an adaptor sequence at the 3′ end of the RNA. Reverse transcription (RT) reaction may then be performed using a primer comprising a sequence that is complementary to the 3′ end of the adaptor sequence.

[0145] (b) Reverse Transcription Using Polyadenylated Sequence Ligated to RNA

[0146] Polyadenylated RNA may be used in a reverse transcription (RT) reaction using a poly(T) primer comprising a 5′ adaptor sequence. The poly(T) sequence may comprise 8, 9, 10, 11, 12, 13, or 14 consecutive thymines. The reverse transcription primer may comprise one of the following sequences:

5′ GCGAGCACAGAATTAATACGACTCACTACCCGTTTTTTTTTTTT
VN 3′
5′-GCGAGCACAGAATTAATACGACTCACTACGCGTTTTTTTTTTTTVN-
3′
5′-GCGAGCACAGAATTAATACGACTCACTATAGGTTTTTTTTTTTTVN
-3′
where V = a mixture of A, C and G and N = a
mixture of all 4 nucleotides.

[0147] (3) RT-PCR of RNA

[0148] The reverse transcript of the RNA may be amplified by real time PCR, using a specific forward primer comprising at least 15 nucleic acids complementary to the target nucleic acid and a 5′ tail sequence; a reverse primer that is complementary to the 3′ end of the adaptor sequence; and a probe comprising at least 8 nucleic acids complementary to the target nucleic acid. The probe may be partially complementary to the 5′ end of the adaptor sequence.

[0149] b. PCR of Target Nucleic Acids

[0150] Methods of amplifying target nucleic acids are described herein. The amplification may be by a method comprising PCR. The first cycles of the PCR reaction may have an annealing temp of 56° C., 57° C., 58° C., 59° C., or 60° C. The first cycles may comprise 1-10 cycles. The remaining cycles of the PCR reaction may be 60° C. The remaining cycles may comprise 2-40 cycles. The annealing temperature may cause the PCR to be more sensitive. The PCR may generate longer products that can serve as higher stringency PCR templates.

[0151] (1) Forward Primer

[0152] The PCR reaction may comprise a forward primer. The forward primer may comprise 15, 16, 17, 18, 19, 20, or 21 nucleotides identical to the target nucleic acid.

[0153] The 3′ end of the forward primer may be sensitive to differences in sequence between a target nucleic acid and a sibling nucleic acid.

[0154] The forward primer may also comprise a 5′ overhanging tail. The 5′ tail may increase the melting temperature of the forward primer. The sequence of the 5′ tail may comprise a sequence that is non-identical to the genome of the animal from which the target nucleic acid is isolated. The sequence of the 5′ tail may also be synthetic. The 5′ tail may comprise 8, 9, 10, 11, 12, 13, 14, 15, or 16 nucleotides. The 5′ overhanging tail may comprise the sequence 5′-ACACTCCAGCTGGG-3′. The 5′ overhanging tail may also comprise the sequence 5′-CAGTCATTTGGG-3′. The forward primer may comprise a sequence corresponding to the sequence of a SEQ ID NO in the “FD-P” column of Table 7.

[0155] (2) Reverse Primer

[0156] The PCR reaction may comprise a reverse primer. The reverse primer may be complementary to a target nucleic acid. The reverse primer may also comprise a sequence complementary to an adaptor sequence. The sequence complementary to an adaptor sequence may comprise 12-24 nucleotides. The reverse primer may comprise the sequence

5′-GCGAGCACAGAATTAATACGAC-3′.

### 6. Expression Analysis of Diseases and Conditions

[0157] Also provided herein is a method of identifying a target nucleic acid associated with a disease or pathological condition. The target nucleic acid may comprise a variant site. The variant site may be associated with a disease, pathological condition, or trait. The trait may be any identifiable state, such as color, height, size, or predisposition. The method may comprise contacting the target nucleic acid with a probe. The level of the probe binding to the target nucleic acid compared to a control may be indicative of a disease, pathological condition, or trait.

[0158] For example, detecting the level (or expression level) of a target nucleic acid compared to a control may provide a high-resolution, high-sensitivity dataset, which may be used in the areas of diagnostics, prognostics, therapeutics, drug development, pharmacogenetics, biosensor development, and other related areas.

[0159] An expression profile generated by the current method may be a “fingerprint” of the state of the sample with respect to a number of target nucleic acids. While two states may have any particular target nucleic acid similarly expressed, the evaluation of a number of target nucleic acids simultaneously allows the generation of a gene expression profile that is characteristic of the state of the cell. That is, normal tissue may be distinguished from diseased tissue. By comparing expression profiles of tissue in known different disease states, information regarding which target nucleic acids are associated in each of these states may be obtained. Then, diagnosis may be performed or confirmed to determine whether a tissue sample has the expression profile of normal or disease tissue. This may provide for molecular diagnosis of related conditions.

[0160] The expression level of a disease-associated target nucleic acid is information in a number of ways. For example, a differential expression of a disease-associated target nucleic acid compared to a control may be used as a diagnostic that a patient suffers from the disease. Expression levels of a disease-associated target nucleic acid may also be used to monitor the treatment and disease state of a patient. Furthermore, expression levels of a disease-associated target nucleic acid may allow the screening of drug candidates for altering a particular expression profile or suppressing an expression profile associated with disease.

[0161] A target nucleic acid may be detected and levels of the target nucleic acid measured by contacting a sample comprising the target nucleic acid with a probe sufficiently complementary to the target nucleic acid and detecting hybridization to the probe above control levels.

[0162] The target nucleic acid may be detected by immobilizing the target nucleic acid to be examined on a solid support such as nylon membranes and hybridizing a labeled probe with the sample. The target nucleic acid may be detected by immobilizing a labeled probe to a solid support and hybridizing a sample comprising a labeled target nucleic acid. Following washing to remove the non-specific hybridization, the label may be detected.

[0163] The target nucleic acid may be detected in a biological sample according to the methods outlined in U.S. patent Ser. No. 11/384,049, the contents of which are incorporated herein by reference.

[0164] The target nucleic acid may also be detected in situ by contacting permeabilized cells or tissue samples with a labeled probe to allow hybridization with the target nucleic acid. Following washing to remove the non-specifically bound probe, the label may be detected.

[0165] These assays can be direct hybridization assays or can comprise sandwich assays, which include the use of multiple probes, as is generally outlined in U.S. Pat. Nos. 5,681,702; 5,597,909; 5,545,730; 5,594,117; 5,591,584; 5,571,670; 5,580,731; 5,571,670; 5,591,584; 5,624,802; 5,635,352; 5,594,118; 5,359,100; 5,124,246; and 5,681,697, each of which is hereby incorporated by reference.

[0166] A variety of hybridization conditions may be used, including high, moderate and low stringency conditions as outlined above. The assays may be performed under stringency conditions which allow hybridization of the probe only to the target. Stringency can be controlled by altering a step parameter that is a thermodynamic variable, including, but not limited to, temperature, formamide concentration, salt concentration, chaotropic salt concentration pH, or organic solvent concentration.

[0167] Hybridization reactions may be accomplished in a variety of ways. Components of the reaction may be added simultaneously, or sequentially, in different orders. In addition, the reaction may include a variety of other reagents. These include salts, buffers, neutral proteins, e.g., albumin, detergents, etc. which may be used to facilitate optimal hybridization and detection, and/or reduce non-specific or background interactions. Reagents that otherwise improve the efficiency of the assay, such as protease inhibitors, nuclease inhibitors and anti-microbial agents may also be used as appropriate, depending on the sample preparation methods and purity of the target.

[0168] a. Diagnostic

[0169] A method of diagnosis is also provided. The method may comprise detecting a differential expression level of disease-associated target nucleic acid in a biological sample. The sample may be derived from a patient. Diagnosis of a disease state in a patient may allow for prognosis and selection of therapeutic strategy. Further, the developmental stage of cells may be classified by determining temporarily expressed disease-associated target nucleic acids.

[0170] In situ hybridization of labeled probes to tissue arrays may be performed. When comparing the fingerprints between an individual and a standard, the skilled artisan may make a diagnosis, a prognosis, or a prediction based on the findings. It is further understood that the genes, which indicate the diagnosis, may differ from those, which indicate the prognosis. In addition, molecular profiling of the condition of the cells may lead to distinctions between responsive or refractory conditions or may be predictive of outcomes. For example, the method of diagnosing may comprise detecting differential levels of cancer-associated target nucleic acids in a biological sample. The source of cancer-associated target nucleic acids may be from a cancer cell characterized by unregulated cell-growth. A cancer cell may include cells arising from breast cancer, colon cancer, lung cancer, prostate cancer, hepatocellular cancer, gastric cancer, pancreatic cancer, cervical cancer, ovarian cancer, liver cancer, bladder cancer, cancer of the urinary tract, thyroid cancer, renal cancer, carcinoma, melanoma, and brain cancer.

[0171] b. Genotyping

[0172] Also provided herein is a method for genotyping using a probe described herein to detect a polymorphism such as a SNP. “Genotyping” used herein may be the determination of the genetic information an individual carries at one or more positions in the genome. For example, genotyping may comprise determining which allele or alleles an individual carries for a single SNP or determining which allele or alleles an individual carries for a plurality of SNPs. A genotype may be the identity of the alleles present in an individual at one or more polymorphic sites.

[0173] (1) Human Diseases and Conditions

[0174] Genotyping may be for measuring the predisposition of a human for a disease or condition. For example, genotyping may be used as described in U.S. Pat. No. 7,127,355, the contents of which are incorporated herein by reference. Genotyping may also be used to predict the response of an individual to a pharmacotherapeutic or other treatment.

[0175] (2) Viral RNA

[0176] Genotyping may also be for detecting the presence of a mutation in a viral genome such as HIV, Hepatitis B Virus, or Human papilloma virus. Examples of such genotyping may be found in U.S. Pat. Nos. 6,797,464 and 6,653,081, and U.S. Patent Pub. Nos. 20050112554 and 2005014379, the contents of which are incorporated herein by reference.

[0177] (3) Bacterial Pathogenesis

[0178] Genotyping may also be for detecting bacterial strains and mutations, such bacterial antibiotic resistance. For example, genotyping may be as described in U.S. Pat. No. 6,913,753, the contents of which are described herein by reference.

### 7. Drug Screening

[0179] A method of screening therapeutics is also provided. The method comprises contacting a pathological cell capable of expressing a disease related nucleic acid with a candidate therapeutic and evaluating the effect of a drug candidate on the expression profile of the disease associated target nucleic acid. Having identified the differentially expressed target nucleic acid, a variety of assays maybe executed. Test compounds may be screened for the ability to modulate gene expression of the disease associated nucleic acid. Modulation includes both an increase and a decrease in gene expression.

[0180] The test compound or drug candidate may be any molecule, e.g., protein, oligopeptide, small organic molecule, polysaccharide, polynucleotide, etc., to be tested for the capacity to directly or indirectly alter the disease phenotype or the expression of the disease associated nucleic acid. Drug candidates encompass numerous chemical classes, such as small organic molecules having a molecular weight of more than 100 and less than about 500, 1,000, 1,500, 2,000 or 2,500 daltons. Candidate compounds may comprise functional groups necessary for structural interaction with proteins, particularly hydrogen bonding, and typically include at least an amine, carbonyl, hydroxyl or carboxyl group, preferably at least two of the functional chemical groups. The candidate agents may comprise cyclical carbon or heterocyclic structures and/or aromatic or polyaromatic structures substituted with one or more of the above functional groups. Candidate agents are also found among biomolecules including peptides, saccharides, fatty acids, steroids, purines, pyrimidines, derivatives, structural analogs or combinations thereof.

[0181] Combinatorial libraries of potential modulators may be screened for the ability to bind to the disease associated nucleic acid or to modulate the activity thereof. The combinatorial library may be a collection of diverse chemical compounds generated by either chemical synthesis or biological synthesis by combining a number of chemical building blocks such as reagents.

[0182] Preparation and screening of combinatorial chemical libraries is well known to those of skill in the art. Such combinatorial chemical libraries include, but are not limited to, peptide libraries encoded peptides, benzodiazepines, diversomers such as hydantoins, benzodiazepines and dipeptide, vinylogous polypeptides, analogous organic syntheses of small compound libraries, oligocarbamates, and/or peptidyl phosphonates, nucleic acid libraries, peptide nucleic acid libraries, antibody libraries, carbohydrate libraries, and small organic molecule libraries.

### 8. Gene Silencing

[0183] A method of reducing expression of a target gene in a cell, tissue or organ is also provided. Expression of the target gene may be reduced by expressing a nucleic acid described herein that comprises a sequence substantially complementary to one or more binding sites of the target mRNA. The nucleic acid may be a miRNA or a variant thereof. The nucleic acid may also be pri-miRNA, pre-miRNA, or a variant thereof, which may be processed to yield a miRNA. The expressed miRNA may hybridize to a substantially complementary binding site on the target mRNA, which may lead to activation of RISC-mediated gene silencing. An example for a study employing over-expression of miRNA is Yekta et al 2004, Science 304-594, which is incorporated herein by reference. One of ordinary skill in the art will recognize that the nucleic acids described herein may also be used to inhibit expression of target genes or inhibit activity of miRNAs using antisense methods well known in the art, as well as RNAi methods described in U.S. Pat. Nos. 6,506,559 and 6,573,099, which are incorporated by reference.

[0184] The target of gene silencing may be a protein that causes the silencing of a second protein. By repressing expression of the target gene, expression of the second protein may be increased. Examples for efficient suppression of miRNA expression are the studies by Esau et al 2004 JBC 275-52361; and Cheng et al 2005 Nucleic Acids Res. 33-1290, which is incorporated herein by reference.

### 9. Gene Enhancement

[0185] A method of increasing expression of a target nucleic acid in a cell, tissue or organ is also provided. Expression of the target nucleic acid may be increased by expressing a nucleic acid described herein that comprises a sequence substantially complementary to a pri-miRNA, pre-miRNA, miRNA or a variant thereof. The nucleic acid may be an anti-miRNA. The anti-miRNA may hybridize with a pri-miRNA, pre-miRNA or miRNA, thereby reducing its gene repression activity. Expression of the target nucleic acid may also be increased by expressing a nucleic acid that is substantially complementary to a portion of the binding site in the target gene, such that binding of the nucleic acid to the binding site may prevent miRNA binding.

### 10. Therapeutic

[0186] A method of modulating a disease or disorder associated with developmental dysfunctions is also provided. The disease or disorder may be cancer, such as prostate or liver cancer. In general, the nucleic acid molecules described herein may be used as a modulator of the expression of genes which are at least partially complementary to said nucleic acid. Further, miRNA molecules may act as target for therapeutic screening procedures, e.g. inhibition or activation of miRNA molecules might modulate a cellular differentiation process, e.g. proliferation or apoptosis. Furthermore, existing miRNA molecules may be used as starting materials for the manufacture of sequence-modified miRNA molecules, in order to modify the target-specificity thereof, e.g. an oncogene, a multidrug-resistance gene or another therapeutic target gene. Further, miRNA molecules can be modified, in order that they are processed and then generated as double-stranded siRNAs which are again directed against therapeutically relevant targets. Furthermore, miRNA molecules may be used for tissue reprogramming procedures, e.g. a differentiated cell line might be transformed by expression of miRNA molecules into a different cell type or a stem cell.

### 11. Luminex Method of Detection

[0187] The method of detecting target nucleic acids or miRNAs includes a number of steps discussed herein. Total RNA is extracted from tissue. The short RNAs fraction is enriched using a YM100 column. The small RNA fraction may be labeled utilizing different methods (e.g., biotinylation). In parallel, miRNA antisense DNA or locked nucleic acid (LNA) probes with an amine-modification may be coupled to carboxylated color-coded Luminex microspheres (beads) using EDC to make coupled bead mixtures, with each mixture containing as many as 100 different miRNA probes, each probe coupled to a bead with a different specific spectral signature or color. Beads may be prepared as a set of 100 distinct kinds that can be differentially detected by the Luminex analyzer. The labeled miRNAs may then hybridized to mixtures of probe-bound color beads. The hybridized miRNA-coupled bead mixture may be treated with streptavidin-R-phycoerythrin dye. The reaction may be analyzed using the Luminex analyzer. Lasers excite the internal dyes that identify each microsphere particle, as well as the reporter dye that is bound to the miRNA. The median intensity of the dye on each bead may be proportional to expression of the specific RNA in the tissue.

[0188] MiRNAs or probes or target nucleic acids may be labeled as follows:

### 12. Direct labeling

[0189] a. Chemical Labeling

[0190] Examples include ULS technology, using part of a PerkinElmer Micromax kit for biotinylation of miRNA. This method labels miRNAs with biotins along their lengths, and was found to be reproducible and robust.

[0191] b. Kreatech Chemical Labeling Kit

[0192] This method labels miRNA or probes or target nucleic acids with biotin with a similar technology as PerkinElmer, but was shown to be somewhat less sensitive.

[0193] c. Enzymatic End Labeling

[0194] Examples include ligation of dinucleotides with a biotin entity (pCU-bio).

### 13. Signal Amplification

[0195] a. TSA

[0196] Tyramide signal amplification (TSA) amplifies the number of biotins in site, starting from one biotin to which a Streptavidin-horse radish peroxidase (HRP) conjugate is bound. The Tyramide biotin substrate is processed by the HRP to produce a non soluble biotin that is precipitated in site, creating a cluster of biotins on the appropriate microsphere.

[0197] b. Genisphere

[0198] The method utilizes a 3DNA system of branched DNA that has a large number of bound biotin molecules, and is useful for detecting miRNAs when only low amounts of starting material are available.

### 14. Transcription

[0199] a. Direct Transcript

[0200] This method generates transcripts labeled with biotin for linear amplification of the RNA. This method may generated transcripted labeled with biotin from target nucleic acids.

[0201] b. SenseAmp Plus

[0202] This method uses amplification of miRNA using a Genisphere kit. Multiple aspects are described herein, illustrated by the following non-limiting examples.

### 15. Possible Applications

[0203] Small RNA proofing using the Luminex technology is a fast and reliable technology and may be applied in high throughput manner to many samples at once. This system is highly sensitive and specific, thus may be applied to a large range of validations and profiling of miRNA or target nucleic acids for basic biological research, diagnostics and therapeutics. The high reproducibility of the technology makes it highly reliable.

[0204] The methods provided herein may be used for validation of newly predicted miRNA in the cell. It may also be used for validation and expression profiling of other short RNAs. It may also be used for validation of expression level of transfected siRNA (inhibitory RNA) expression in cells in therapeutic or research applications. It may also be used for expression proofing of miRNA in cells, tissues and body fluids for: discovery of miRNA differentiation in cancer and normal cells, early detection of cancer cells in body fluids and biopsies, prognosis of cancer stage, prediction of potential survival and response to treatments, determining tissue origin of metastasis carcinoma, for assigning appropriate anti-cancerous treatment, or for screening for potential therapeutic compounds. It may also be used for profiling miRNA in embryonic samples for the study of tissue development and differentiation.

### 16. Kits

[0205] A kit is also provided and may comprise a nucleic acid described herein together with any or all of the following: assay reagents, buffers, probes and/or primers, and sterile saline or another pharmaceutically acceptable emulsion and suspension base. In addition, the kits may include instructional materials containing directions (e.g., protocols) for the practice of the methods described herein.

[0206] For example, the kit may be a kit for the amplification, detection, identification or quantification of a target nucleic acid sequence. The kit may comprise a poly(T) primer, a forward primer, a reverse primer, and a probe.

### EXAMPLES

### Example 1

### Methods of Generating a Target Nucleic Acid

[0207] A method for generating a target nucleic acid from miRNA is described below. Total RNA was isolated and extracted from cultured CHO cells. An adaptor sequence was generated using polyadenylation or an adaptor sequence was ligated to an adapter sequence prior to reverse transcription. A ligation reaction was then performed by T4 RNA ligase to ligate an adaptor sequence at the 3′ end of the RNA.

[0208] Reverse transcription (RT) reaction was performed using a primer comprising a sequence that is complementary to the 3′ end of the adaptor sequence. The reverse transcription primer (oligodT primer) was chosen from one of the following sequences:

(SEQ ID NO 2083

[symbol]

5′-GCGAGCACAGAATTAATACGACTCACTACCCGTTTTTTTTTTTTVN-
3′

(SEQ ID NO 2083

[symbol]

5′-GCGAGCACAGAATTAATACGACTCACTATCGGTTTTTTTTTTTTVN-
3′

(SEQ ID NO 20853)

5′-GCGAGCACAGAATTAATACGACTCACTACCCGTTTTTTTTTTVN-3′

(SEQ ID NO 2085

[symbol]

5′-GCGAGCACAGAATTAATACGACTCACTATCCGTTTTTTTTTTTTVN-
3′

(SEQ ID NO 2085

[symbol]

5′-GCGAGCACAGAATTAATACGACTCACTATCCCTTTTTTTTTTTTVN-
3′

(SEQ ID NO 2085

[symbol]

5′-GCGAGCACAGAATTAATACGACTCACTATCCGTTTTTATTTTTTVN-
3′

(SEQ ID NO 2085

[symbol]

5′-GCGAGCACAGAATTAATACGACTCACTATAGGTTTTTTTTTTTTVN-
3′

(SEQ ID NO 2085

[symbol]

5′-GCGAGCACAGAATTAATACGACTCACTATCCGATTTTTTTTTTTVN-
3′ [symbol]
indicates data missing or illegible when filed

where V=a mixture of A, C and G and N=a mixture of all 4 nucleotides. The reverse transcript of the RNA was amplified by real time PCR reaction, using a specific forward primer that is complementary to the target nucleic acid and a 5′ tail sequence. The forward primers was chosen from the sequences of 5′-CAGTCATTTGGG-3′ (SEQ ID NO 20839) or the corresponding to the sequence of a SEQ ID NO in the “FD-P” column of Table 7.

[0209] A reverse primer was also chosen that is complementary to the 5′ end of the adaptor sequence. The reverse primer was 5′-GCGAGCACAGAATTAATACGAC-3′ (SEQ ID NO 20859). The probe was partially complementary to the 3′ end of the adaptor sequence.

[0210] PCR was then performed. The first cycles of the PCR reaction had an annealing temp of 58° C. The first cycles are 5 cycles. The remaining cycles of the PCR reaction was 60° C. The remaining cycles was 35 cycles. A target nucleic acid was generated from the methods describe above with the sequence 5′-TGAGGTAGTAGGTTGTATAGTT-3′ (SEQ ID No: 20840)

### Example 2

### Probes for Detecting a Target Nucleic Acid

[0211] Probes for detecting a target nucleic acid are described herein. The probe to a polyadenylated cDNA was generated with the sequence 5′-CCGTTTTTTTTTTTT-3′ (SEQ ID No: 20845). This sequence was then followed by a sequence complementary to target binding region to ensure the probe was partially complementary to the 3′ end of the adaptor sequence of the target nucleic acid. The synthetic target binding region had three variations, with each variation shifted by one nucleotide relative to the target nucleic acid.

[0212] The three variations of probes were used that were capable of binding to a target nucleic acid comprising the sequence 5′-TGAGGTAGTAGGTTGTATAGTT-3′ (SEQ ID No: 20840) comprised the following sequences:

| | |
|---|---|
| Probe_v1 | |
| 5′-CCGTTTTTTTTTTTTAACTATAC-3′ | (SEQ ID No: 20846) |
| Probe_v2 | |
| 5′-CCGTTTTTTTTTTTTACTATACA-3′ | (SEQ ID No: 20847) |
| Probe_v3 | |
| 5′-CCGTTTTTTTTTTTTCTATACAA-3′ | (SEQ ID No: 20848) |

[0213] The sequence of the target binding region cannot have a 3′ terminal ‘A.’ For example, the three variations of probes capable of binding to a target nucleic acid comprising the sequence 5′-TGATTGGTACGTCTGTGGGTAGA-3′ (SEQ ID No: 20849) comprise the following sequences:

| | |
|---|---|
| Probe_v1 | |
| 5′-CCGTTTTTTTTTTTTCTACCCAC-3′ | (SEQ ID No: 20850) |
| Probe_v2 | |
| 5′-CCGTTTTTTTTTTTTACCCACAG-3′ | (SEQ ID No: 20851) |
| Probe_v3 | |
| 5′-CCGTTTTTTTTTTTTCCCACAGA-3′ | (SEQ ID No: 20852) |

[0214] The probes also could be designed with sequence corresponding to a sequence of a SEQ ID NO in the “Probe1,” “Probe2,” or “Probe3” columns of Table 7.

### Example 3

### Detecting a Single Nucleotide Difference: Let-7a Versus Let-7d

[0215] Members of the human Let-7 family of miRNAs that only differ by one nucleotide were detected using the method described in Example 1. The sequences of two members of this family were as follows:

(SEQ ID NO: 20840)

| | |
|---|---|
| hsa-Let-7a | 5′-UGAGGUAGUAGGUUGUAUAGUU-3′ |

(SEQ ID NO: 20841)

| | |
|---|---|
| hsa-Let-7c | 5′-UGAGGUAGUAGGUUGUAUGGUU-3′ |

(SEQ ID NO: 20842)

| | |
|---|---|
| hsa-Let-7d | 5′-AGAGGUAGUAGGUUGCAUAGU-3′ |

[0216] A minor groove binder (MGB) probe with (i) a 5′-CCG sequence that had no mismatch to the adaptor sequence of the reverse transcription primer as described above (i.e., 0 mismatch), and (ii) that was perfectly-matched to Let-7a at its 3′ end was used in real time PCR (FIG. 3). Quantification of the 0 mismatch probe during real time PCR revealed that Let-7a miRNA was not distinguishable from Let-7c. This was demonstrated by the similar cycle thresholds (CT) observed for Let-7a and Let-7c, which were 23.43 and 23.73, respectively, at a concentration of 3.50E-05 ng/μl (Table 7).

[0217] However, using a Let-7a-specific MGB probe with one mismatch to the adaptor sequence (FIG. 4) enabled the distinction between Let-7a and Let-7c via real time PCR, as shown by the difference in their corresponding C_{T} (Table 7). The C_{T} for Let-7a and Let-7c as detected by the one mismatch Let-7a-specific probe were 28.3 and not detected (ND) after 40 cycles, respectively, at a concentration of 3.50E-05 ng/μl.

[0218] The high specificity remained even when very similar miRNAs were mixed (Let-7a, Let-7c and Let-7d). As shown in Table 8A, the detected C_{T} in the mixture was almost identical to the one detected for each of the miRNAs separately.

[0219] The above-described method was also successfully tested using a Let-7a-specific MGB probe with two 5′ mismatches to the adaptor sequence. As shown in Table 7, use of the two mismatch Let-7a-specific probe enabled differential detection of Let-7a and Let-7c at a concentration of 3.50E-04 ng/μl, but increased the C_{T} compared to the one mismatch Let-7a-specific probe.

TABLE 7
Detection of the Let-7 family members by a Let-7a probe

| | | C_{T} | | |
|---|---|---|---|---|
| | Conc. | 2 | 1 | 0 |
| RNA | (ng/μl) | mismatch | mismatch | mismatch |
| Let-7a | 3.50E−04 | 25.15 | 23.87 | 19.58 |
| | 3.50E−05 | 29.35 | 28.27 | 23.43 |
| | 3.50E−06 | 32.65 | 31.60 | 26.77 |
| Let-7c | 3.50E−04 | 33.81 | 31.89 | 19.92 |
| | 3.50E−05 | ND | ND | 23.73 |
| | 3.50E−06 | ND | ND | 27.02 |
| Let-7d | 3.50E−04 | 30.50 | 29.63 | 27.03 |
| | 3.50E−05 | 35.02 | 34.16 | 30.08 |
| | 3.50E−06 | 37.91 | 37.17 | 33.22 |

[0220] Table 8A also shows that a Let-7c-specific probe be with one mismatch compared to the adaptor sequence, detects Let-7c with a C_{T} lower than that for Let-7a or Let-7d, therefore demonstrating an ability to distinguish between Let-7c and its other family members. Likewise, a 1 mismatch Let-7d-specific probe detected Let-7d at a lower C_{T} compared to Let-7a or Let-7c.

TABLE 8
A Detection of the Let-7 family members by Let-7 family probes

| Fwd primer: Let-7a | | | Fwd primer: Let-7d | | | Fwd primer: Let-7c | | |
|---|---|---|---|---|---|---|---|---|
| MGB probe: Let-7a | | | MGB probe: Let-7d | | | MGB probe: Let-7c | | |
| | Conc. | C_{T} | | Conc. | C_{T} | | Conc. | C_{T} |
| RNA | (ng/μl) | 1 mismatch | RNA | (ng/μl) | 1 mismatch | RNA | (ng/μl) | 1 mismatch |
| Let-7a | 3.5E−04 | 25.42 | Let-7a | 3.5E−04 | 32.48 | Let-7a | 3.5E−04 | 38.65 |
| | 3.5E−05 | 29 | | 3.5E−05 | 35.9 | | 3.5E−05 | ND |
| | 3.5E−06 | 32.57 | | 3.5E−06 | 38.59 | | 3.5E−06 | ND |
| Let-7c | 3.5E−04 | 36.08 | Let-7c | 3.5E−04 | ND | Let-7c | 3.5E−04 | 25.17 |
| | 3.5E−05 | ND | | 3.5E−05 | ND | | 3.5E−05 | 31.11 |
| | 3.5E−06 | ND | | 3.5E−06 | ND | | 3.5E−06 | 32.81 |
| Let-7d | 3.5E−04 | 31.99 | Let-7d | 3.5E−04 | 20.76 | Let-7d | 3.5E−04 | ND |
| | 3.5E−05 | 35.88 | | 3.5E−05 | 24.54 | | 3.5E−05 | ND |
| | 3.5E−06 | ND | | 3.5E−06 | 27.83 | | 3.5E−06 | ND |
| Mix: | 3.5E−04 | 25.49 | Mix: | 3.5E−04 | 20.72 | Mix: | 3.5E−04 | 25.18 |
| Let7 | 3.5E−05 | 28.85 | Let7 | 3.5E−05 | 24.29 | Let7 | 3.5E−05 | 31.18 |
| a + c + d | 3.5E−06 | 33.52 | a + c + d | 3.5E−06 | 27.84 | a + c + d | 3.5E−06 | 32.67 |

[0221] The above-described method was also successfully tested using oligodT primers comprising a mismatch to the cDNA adaptor sequence at different positions as indicated in Table 2B (SEQ ID NOS 20853-20856).

[0222] The results described in Table 7 and Table 8A-B demonstrate that real time PCR using a probe or oligodT primers as described herein is capable of differentially detecting target nucleic acids that differ in sequence by a few as one nucleotide.

TABLE 8

Detection of the Let-7 family members by using oligidT primers
comprising a mismatch at different positions

| synthetic miRNA target | | | | | | | | |
|---|---|---|---|---|---|---|---|---|
| let-7a | | | let-7c | | | let-7d | | |
| 3.5E−04 | 3.5E−05 | 3.5E−06 | 3.5E−04 | 3.5E−05 | 3.5E−06 | 3.5E−04 | 3.5E−05 | 3.5E−06 |

Adaptor: GCGAGCACAGAATTAATACGACTCACTATCGGTTTTTTTTTTTTVN SEQ ID NO. 20837

| | | | | | | | | | |
|---|---|---|---|---|---|---|---|---|---|
| let-7a | 26.1 | 29.44 | 33.64 | ND | ND | ND | 30.42 | 34.27 | 38.4 |
| let-7c | 47.38 | ND | ND | 26.86 | 32.58 | 36.72 | ND | ND | ND |
| let-7d | 32.04 | 35.94 | 39.49 | ND | ND | ND | 20.72 | 24.5 | 28.06 |

Adaptor: GCGAGCACAGAATTAATACGACTCACTATCGGTTTTTTTTTTTTVN SEQ ID NO. 20837

| | | | | | | | | | |
|---|---|---|---|---|---|---|---|---|---|
| let-7a | 25.42 | 29 | 32.57 | 36.08 | ND | ND | 31.99 | 35.88 | 41.13 |
| let-7c | 38.65 | ND | ND | 25.17 | 31.11 | 32.81 | 45.8 | ND | ND |
| let-7d | 32.48 | 35.9 | 38.59 | ND | ND | ND | 20.76 | 24.54 | 27.83 |

Adaptor: GCGAGCACAGAATTAATACGACTCACTATCCCTTTTTTTTTTTTVN SEQ ID NO. 20855

| | | | | | | | | | |
|---|---|---|---|---|---|---|---|---|---|
| let-7a | 26.6 | 30.49 | 34.85 | ND | ND | 43.17 | 30.37 | 34.86 | 39.22 |
| let-7c | ND | ND | ND | 26.66 | 32.48 | 34.65 | ND | ND | ND |
| let-7d | 32.01 | 35.87 | 39.67 | ND | ND | ND | 21.01 | 24.84 | 27.77 |

Adaptor: GCGAGCACAGAATTAATACGACTCACTATCCGTTTTTATTTTTTVN SEQ ID NO. 20856

| | | | | | | | | | |
|---|---|---|---|---|---|---|---|---|---|
| let-7a | 29.72 | 36.16 | 38.86 | ND | ND | ND | ND | ND | ND |
| let-7c | ND | ND | ND | 32.01 | ND | ND | ND | ND | ND |
| let-7d | 33.08 | 39 | 41.68 | ND | ND | ND | 22.47 | 26.19 | 29.08 |

Adaptor: GCGAGCACAGAATTAATACGACTCACTATCCGATTTTTTTTTTTVN SEQ ID NO. 20858

| | | | | | | | | | |
|---|---|---|---|---|---|---|---|---|---|
| let-7a | 24.54 | 29.43 | 33.08 | ND | ND | ND | 31.67 | 34.87 | 37.23 |
| let-7c | ND | ND | ND | 26.13 | 33.13 | 35.55 | ND | ND | ND |
| let-7d | 31.01 | 35.21 | 37.93 | ND | ND | ND | 21.34 | 24.3 | 27.53 |

### EXAMPLE

### Detecting a Single Nucleotide Difference: miR-99a versus miR-100

[0223] The single nucieotide difference between the miRNAs miR-99a and miR-100 was also detected using real time PCR using a method similar to that described in Examples 1 and 2. The sequences of the miRNAs were as follows:

(SEQ ID NO: 20843)

| | |
|---|---|
| miR-99a: | 5′-AACCCGUAGAUCCGAUCUUGUG-3′ |

(SEQ ID NO: 20844)

| | |
|---|---|
| miR-100: | 5′-AACCCGUAGAUCCGAACUUGUG-3′ |

[0224] As shown in Table 9, a probe with 1 mismatch to the cDNA adaptor sequence, but no mismatch compared to miR-99a recognized miR-99 at a C_{T}˜9 cycles lower compared to miR-100, at the same RNA concentration.

[0225] Conversely, a probe with 1 mismatch to the cDNA adaptor sequence, but no mismatch to miR-100 recognized miR-100 at a C_{T} which was ˜5 cycles lower than the C_{T} detected for miR-99. The high specificity of the method of the present invention remains even when these very similar miRNAs were mixed together (Table 9).

TABLE 9
Detection of hsa-miR-99a and hsa-miR-100

| Fwd primer: hsa-miR-99 | | | Fwd primer: hsa-miR-100 | | |
|---|---|---|---|---|---|
| MGB probe: miR-99 | | | MGB probe: miR-100 | | |
| | Amount | | | Amount | |
| RNA | (fmole) | C_{T} | RNA | (fmole) | C_{T} |
| miR-99a | 1.00E−02 | 26.42 | miR-99a | 1.00E−02 | 30.85 |
| | 2.50E−04 | 28.05 | | 2.50E−04 | 32.03 |
| | 6.25E−05 | 30.27 | | 6.25E−05 | 34.05 |
| | 1.56E−05 | 32.26 | | 1.56E−05 | 35.99 |
| miR-100 | 1.00E−02 | 35.49 | miR-100 | 1.00E−02 | 24.78 |
| | 2.50E−04 | 37.46 | | 2.50E−04 | 26.99 |
| | 6.25E−05 | 39.33 | | 6.25E−05 | 29.27 |
| | 1.56E−05 | 40.97 | | 1.56E−05 | 31.89 |
| Mix: | 1.00E−02 | 27.13 | Mix: | 1.00E−02 | 27.82 |
| miR-99 + | 2.50E−04 | 29.2 | miR-99 + | 2.50E−04 | 29.78 |
| miR-100 | 6.25E−05 | 31.57 | miR-100 | 6.25E−05 | 31.88 |
| | 1.56E−05 | 34.09 | | 1.56E−05 | 34.26 |

### Example 5

### Sensitivity for Detecting a Target Nucleic Acid

[0226] The sensitivity of real time PCR was also tested. hsa-miR-122a, which is a liver specific miRNA, was amplified from different RNA sources (brain, liver and Hela cells, or mixtures thereof) by real time reverse transcription-PCR, according to the method described in Examples 1 and 2 using a miR-122a-specific probe. The initial RNA amount per reverse transcription reaction was 0.5 ng of total RNA. The amount of the brain total RNA was increased, while the amount of liver total RNA was decreased (according to the ratios listed in Table 10).

[0227] As shown in Table 10, liver-specific miRNA expression was detected. No signal was detected from a RNA source other than liver (Brain, HeLa), but was detected from liver RNA. Additionally, when the amount of liver RNA was decreased by half, the C_{T} increased by 1, until the number of relevant molecules is was low (less than ˜20 molecules). Furthermore, even when as little as 0.03125% of an RNA pool was from liver, miR-122a was detected in a background of 99.96875% irrelevant RNA. Such sensitivity has not been achieved by other known methods.

TABLE 10
Detection of miR-122a in RNA from different sources

| RNA source | Average C_{T} | STDEV | ΔC_{T} |
|---|---|---|---|
| Brain | | | |
| HeLa | | | |
| Liver | | | |
| HeLa 96%, Liver 4% | 32.63 | 0.22 | 0.78 |
| HeLa 98%, Liver 2% | 33.41 | 0.14 | 1.00 |
| HeLa 99%, Liver 1% | 34.41 | 0.35 | 1.38 |
| HeLa 99.5%, Liver 0.5% | 35.79 | 0.60 | 0.83 |
| HeLa 99.75%, Liver 0.25% | 36.62 | 0.82 | 0.98 |
| HeLa 99.875%, Liver 0.125% | 37.60 | 0.72 | 0.87 |
| HeLa 99.9375%, Liver 0.0625% | 38.47 | 0.96 | 1.48 |
| HeLa 99.96875%, Liver 0.03125% | 39.95 | | |
| Brain | ND | ND | |
| Liver | 27.38 | 0.17 | |
| HeLa | ND | ND | |

### Example 6

### Detection of Synthetic miR 124a in a Diverse RNA Background

[0228] The sensitivity of the method described in Examples 1 and 2 was tested by detecting a particular target nucleotide sequence when low concentrations of the target are present within a high background concentration of nucleic acids. Reduced amounts of synthetic miR-124a were added to 0.05 ng of total background RNA from HeLa cells for a final concentration ranging from 2.35×10⁻⁶ fmol to 1.16×10⁻⁹ fmol of miR-124a target nucleotide sequences. Each concentration was performed in 5 replicates. The average C_{T} and standard deviation were calculated. Table 11 demonstrates that the background RNA from the HeLa cells provided a signal of 47.61 C_{T}. The C_{T} was increased by ˜1 when the amount of synthetic 124a-RNA was decreased by half in the higher concentrations. The minimal amount of synthetic 124a-RNA that gave a signal above the background signal is 1.86×10⁻⁸ fmol.

TABLE 11
Detection of synthetic miR-124a in a diverse RNA background

| RNA: miR-124a | Average | STDEV | ΔCt |
|---|---|---|---|
| 2.38E−06 fmol | 35.18 | 0.43 | 1.06 |
| 1.19E−06 fmol | 36.24 | 0.36 | 1.00 |
| 5.95E−07 fmol | 37.24 | 0.75 | 1.59 |
| 2.98E−07 fmol | 38.83 | 1.03 | 3.58 |
| 1.49E−07 fmol | 42.42 | 3.35 | 1.41 |
| 7.44E−08 fmol | 43.82 | 5.04 | −0.11 |
| 3.72E−08 fmol | 43.72 | 4.57 | 2.78 |
| 1.86E−08 fmol | 46.50 | 3.38 | 1.76 |
| 9.30E−09 fmol | 48.26 | 1.41 | 0.07 |
| 4.65E−09 fmol | 48.33 | 2.35 | 1.27 |
| 2.32E−09 fmol | 49.60 | 0.55 | −1.55 |
| 1.16E−09 fmol | 48.05 | 2.69 | |
| HeLa 0.05 ng | 47.61 | 2.93 | |
| Brain 0.05 ng | 25.34 | 0.12 | |
| No cDNA | ND | | |

### Example 7

### Detection of Different miRNA Target Sequences in Human Serum

[0229] The method described in Examples 1 and 2 was then applied to detecting many miRNA target sequences in the human serum. Total RNA was extracted from serum samples of three individuals by using LS buffer (Promega) in combination with the Mirvana kit (Ambion). Volumes of 300 μl of serum were obtained from subject number 5 and 7, and 150 μl of serum was obtained from subject number 6 for RNA purification. A total of 10% of the purified RNA was used for each PCR and hybridization reaction according to the methods described above. Probes specific for the miR target sequences are shown in Table 12 below. Table 12 demonstrates that different microRNAs such as miR-21, hsa-miR-142-3p and Let-7d could specifically be detected in a serum sample. Table 12 indicates that various miRNA target sequences can be extracted, isolated and detected from biological fluids such as human serum.

TABLE 12
Detection of different microRNA target sequences in human serum

| Fwd primer and | Sample no. 5 | Sample no. 6 | Sample no. 7 |
|---|---|---|---|
| MGB probe | C_{T} | C_{T} | C_{T} |
| hsa-miR-21 | 33.03 | 31.28 | 29.55 |
| hsa-miR-142-3p | 35.3 | 39.27 | 37.16 |
| Let-7a | ND | 39.22 | 36.63 |
| Let-7c | ND | ND | ND |
| Let7-d | 33.89 | 34.71 | 34.01 |
| hsa-miR-99a | ND | ND | ND |
| hsa-miR-100 | ND | ND | ND |
| hsa-miR-125a | ND | ND | ND |
| hsa-miR-125b | 36.72 | 36.3 | 39.37 |
| hsa-miR-122a | 38.6 | 35.8 | 35.99 |
| hsa-miR-124a | ND | ND | ND |

### Example 8

### Detection of Different miRNA Target Sequences in Formalin Fixed, Paraffin-Embedded (FFPE) Tissues

[0230] RNA was isolated from formalin fixed, paraffin-embedded (FFPE) tissues originated from bladder, prostate and liver with colon metastasis.

[0231] 1 ml Xylene (Biolab) was added to 1-2 mg tissue, incubated at 57° C. for 5 min and centrifuged for 2 min at 10,000 g. The supernatant was removed, and 1 ml Ethanol (100%) (Biolab) was added. Following centrifugation for 10 min at 10,000 g, the supernatant was discarded and the washing procedure was repeated. Following air drying for 10-15 min, 500 μl Buffer B (NaCl 10 mM, Tris pH 7.6, 500 mM, EDTA 20 mM, SDS 1%) and 5 ul proteinase K (50 mg/ml) (Sigma) were added. Following incubation at 45° C. for 16 h, inactivation of the proteinase K at 100° C. for 7 min was preformed. Following extraction with acid phenol chloroform (1:1) (Sigma) and centrifugation for 10 min at maximum speed at 4° C., the upper phase was transferred to a new tube with the addition of 3 volumes of 100% Ethanol, 0.1 volume of NaOAc (BioLab) and 8 μl glycogen (Ambion) and left over night at −20° C.

[0232] Following centrifugation at maximum speed for 40 min at 4° C., washing with 1 ml Ethanol (85%), and drying, the RNA was re-suspended in 45 μl DDW.

[0233] The RNA concentration was tested and DNase Turbo (Ambion) was added accordingly (1 μl DNase/10 μg RNA). Following Incubation for 30 min at room temperature and extraction with acid phenol chloroform and precipitation, the RNA was re-suspended in 45 μl DDW. The RNA concentration was tested again and DNase Turbo (Ambion) was added accordingly (1 μl DNase/10 μg RNA). Following incubation for 30 min at room temperature and extraction with acid phenol chloroform and precipitation, the RNA was re-suspended in 20 μl DDW.

[0234] A total of 10% of the purified RNA was used for each PCR and hybridization reaction according to the methods described above. Probes specific for the miR target sequences are shown in Table 13 below. Table 13 demonstrates that different microRNAs could specifically be detected in FFPE sample. Table 13 indicates that various microRNA target sequences can be extracted, isolated and detected from FFPE tissues.

TABLE 13
Detection of different microRNA target sequences in (FFPE) tissues

| Fwd primer | | | C_{T} | C_{T} | | |
|---|---|---|---|---|---|---|
| and MGB | C_{T} | C_{T} | Liver- | Liver- | C_{T} | C_{T} |
| probe | Bladder | Bladder | Colon | Colon | Bladder | Prostate |
| Let7d | 35.27 | 35.37 | 38.28 | 38.6 | 37.27 | 35.9 |
| miR-126 | 34.33 | 34.2 | 34.75 | 33.54 | 35.48 | 34.72 |
| miR-24 | 31.22 | 31.12 | 34.35 | 33.24 | 34.34 | 33.03 |
| miR-21 | 33.07 | 31.88 | 31.56 | 30.68 | 29.85 | 31.41 |
| miR-122a | ND | ND | 31.58 | 33.02 | ND | ND |
| miR-494 | ND | ND | ND | ND | ND | ND |
| miR-125a | 36.87 | 37.08 | 37.54 | 36.11 | 38.17 | 37.59 |
| miR-125b | 34.45 | 34.64 | 30.31 | 30.97 | 32.79 | 29.89 |
| miR-145 | 35.03 | 36.19 | 34.13 | 33.2 | 32.68 | 29.81 |
| miR-194 | 39.01 | 40.69 | 33.75 | 33.5 | 42.9 | 44.2 |
| miR-205 | 29.22 | 29.13 | ND | ND | 33.38 | 32.05 |
| miR-124a | ND | ND | ND | ND | | ND |

### Example 9

### Detection of Different miRNA Target Sequences in Amniotic Fluids

[0235] 20 ml of Amniotic fluid (non miconial) was collected during caesarean surgery, into 2×15 ml tubes. Cells were recovered by centrifugation at 1000 g for 10 minutes at 4° C. Supernatant was collected and aliquoted to eppendorf tubes at volumes of 400 μl and frozen at −80° C. Cell pellet was re-suspended with PBS and re-centrifuged at the same conditions. Then pellet was re-suspended in 0.5 ml buffer A (taken from EZ-RNA II kit by Biological Industries), transferred to an eppendorf tube and stored at −80° C.

[0236] RNA from Amniotic cell fraction was extracted using EZ-RNA II kit (Biological Industries, Israel) according to the manufacturer's protocol.

[0237] RNA in the amniotic fluid supernatant is extracted as described below:

[0238] 100 μl of sample was incubated at 56° C. for 1 h in 0.8 ml of pre-heated extraction solution (NaCl, 0.1M; Tris Hcl pH8, 10 mM; DTT, 40 mM; EDTA pH8, 10 mM; SDS 70 mM; Proteinase K, 0.65 mg/ml). Spikes were added as control.

[0239] 90 μl of 3M NaOAc and 1 ml of acid phenol:chloroform were added. Incubation at 4° C. until two phases were separated (at least 20 min). Centrifugation was preformed at 16,000 g for 20 min at RT. The aqueous phase (−1 ml) was transferred to a new tube. 8 μl glycogen and 3 vol. ETOH were added and precipitated ON at −20° C. Centrifugation was preformed for 40 min at max speed at 4° C.

[0240] The pellet was washed with 85% ETOH, dried at 65° C. and re-suspended in 43 μl DDW. 2 μl Turbo DNase (Ambion) and 5 μl Buffer were added, and incubation was preformed for 1 h at 37° C.

[0241] Following extraction with acid phenol:chloroform, the pellet was re-suspend in 20 μl DDW.

[0242] RNA isolated from 100 μl of amniotic fluid was used for each PCR and hybridization reaction according to the methods described in Examples 1 and 2.

[0243] Table 14 demonstrates that different microRNAs could specifically be detected in amniotic fluid samples obtained from 6 individuals. Table 14 indicates for the first time that various microRNA target sequences can be extracted, isolated and detected from amniotic fluid samples.

TABLE 14
Detection of different microRNA target sequences in amniotic fluids

| C_{T} 1 | 2 | 3 | 4 | 5 | 6 | miR name |
|---|---|---|---|---|---|---|
| 35.16 | 37.78 | 34.01 | 35.67 | 33.79 | 33.71 | Let7d |
| 34.8 | 44.23 | 35.78 | 38.97 | 38.05 | 36.42 | miR-126 |
| 32.63 | 33.99 | 30.28 | 31.89 | 31.52 | 30.62 | miR-24 |
| 30.52 | 33.01 | 29.64 | 30.15 | 30.2 | 28.97 | miR-21 |
| 31.73 | 34.56 | 32.41 | 32.64 | 31.92 | 31.91 | miR-16 |
| 35.47 | 40.9 | 36.79 | 42.42 | 38.92 | 38.6 | miR-451 |

### Example 10

### Detection of Different miRNA Target Sequences in Human Urine

[0244] The protocol used for miRNA extraction from urine (500 μl) is the same as described in Example 9. Table 15 demonstrates that different microRNAs could specifically be detected in human urine sample. Table 15 indicates for the first time that various microRNA target sequences can be extracted, isolated and detected from human urine.

TABLE 15
Detection of different microRNA target sequences in human urine

| miR name | C_{T} |
|---|---|
| miR-103 | 39.2798 |
| miR-22 | 37.341 |
| miR-320 | 38.038 |
| miR-192 | 39.793 |
| miR-200c | 39.0157 |
| miR-92 | 36.7871 |
| miR-21 | 34.3883 |
| miR-375 | 38.0334 |
| miR-93 | 39.6563 |
| U6 snRNA | 36.9035 |

### Example 11

### Detection of Different miRNA Target Sequences in Saliva, Pleural and Breast Secretions

[0245] The protocol used for miRNA extraction from saliva, pleural and breast secretions is the same as described in Example 9 with minor modifications. To improve the purity of saliva RNA extracted the incubation with proteinase K was extended for 3 h and RNA was precipitated at −80° C. overnight.

[0246] Table 16A-B demonstrate that different microRNAs could specifically be detected in human saliva, pleural and breast secretions. Table 16 indicates for the first time that various microRNA target sequences can be extracted, isolated and detected from human saliva pleural and breast secretions.

TABLE 16
Detection of different microRNA target sequences in human saliva

| target | cDNA, 5 ng/ul | cDNA 1 ng/ul |
|---|---|---|
| miR-205 | undetected | undetected |
| miR-21 | 31.64 | 33.86 |
| miR-223 | 27.29 | 29.10 |
| miR-491 | 35.16 | 37.22 |
| miR-494 | undetected | undetected |
| U6 | 24.89 | 27.10 |

TABLE 16B
Detection of different microRNA target sequences
in human pleural and breast secretions

| | Breast | | | Pleural | | |
|---|---|---|---|---|---|---|
| target | 2.5 | 0.25 | Δ 0.25 − 2.5 | 2.5 | 0.25 | Δ 0.25 − 2.5 |
| let7d | 37.6 | 40.05 | 2.45 | 33 | 36.88 | 3.88 |
| mir-126 | ND | ND | ### | 34.26 | 37.4 | 3.14 |
| hsa-miR- | ND | ND | ### | 30.74 | 34.49 | 3.75 |
| 24 | | | | | | |
| mir-21 | 34.22 | 37.47 | 3.25 | 27.18 | 30.82 | 3.64 |
| hsa-miR- | 41 | ND | ### | 30.8 | 34.41 | 3.61 |
| 16 | | | | | | |
| hsa-miR- | ND | ND | ### | 33 | 37.53 | 4.53 |
| 451 | | | | | | |

### Example 12

### Using Eclipse Probes for Detecting a Target Nucleic Acid

[0247] MGB Eclipse probes carry a minor binder moiety that allows the use of short probes for very high specificity. These are short linear probes that have a minor groove binder and a fluorophore (or quencher) on the 5′ end and a quencher (or fluorophore) on the 3′ end, which is the opposite orientation of the MGB molecule used in Example 3 (TaqMan MGB probes). The minor groove binder may prevent the exonuclease activity of the Taq polymerase from cleaving the probe.

[0248] The eclipse MGB molecule was used in a quantitative real time PCR reaction according to the same conditions which were used with the previous MGB probes. The sequences of the Oligo dT PCR primers and probes are presented below.

(SEQ ID NO. 20860)

| | |
|---|---|
| Probe Let7A21: | CCGTTTTTTTTTTAACTATAC |

(SEQ ID NO. 20861)

| | |
|---|---|
| Probe Let7C21: | CCGTTTTTTTTTTAACCATAC |

The RT-primer sequence that was used for the eclipse reaction:

(SEQ ID NO. 20862)

| | |
|---|---|
| RT10: | GCGAGCACAGAATTAATACGACTCACTATCGGTTTTTTTTTTVN |

[0249] Using a Let-7a or Let-7c-specific eclipse MGB probes with one mismatch to the adaptor sequence enabled the distinction between Let-7a and Let-7c via real time PCR, as shown by the difference in their corresponding C_{T} (Table 17).

TABLE 17
Detection of the Let-7 family members by eclipse MGB probe

| RNA sample | Probe &primer | Probe &primer |
|---|---|---|
| name | Let7A | Let7C |
| Let7A RNA | 27.38 | 35.49 |
| Let7C RNA | 31.27 | 30.63 |
| Let7A + C RNA | 26.88 | 31.99 |
| Let7A RNA | 31.4 | 40.04 |
| Let7C RNA | 33.43 | 34.89 |
| Let7A + C RNA | 31.25 | 37.1 |
| Let7A RNA | 35.97 | 43.46 |
| Let7C RNA | 40.15 | 41.41 |
| Let7A + C RNA | 34.09 | 39.8 |

### Example 13

### Prediction of mRNAs

[0250] We surveyed the entire human genome for potential miRNA coding genes using computational approaches similar to those described in U.S. Patent Application Nos. 60/522,459, 10/709,577 and 10/709,572, the contents of which are incorporated herein by reference, for predicting miRNAs. Briefly, non-protein coding regions of the entire human genome were scanned for hairpin structures. The predicted hairpins and potential miRNAs were scored by thermodynamic stability, as well as structural and contextual features. The algorithm was calibrated by using miRNAs in the Sanger Database which had been validated. Table 1 of U.S. patent application Ser. No. 11/429,720, the contents of which are incorporated herein, lists the SEQ ID NO for each predicted hairpin (“HID”) from the computational screen. Table 1 of U.S. patent application Ser. No. 11/429,720 also lists the genomic location for each hairpin (“Hairpin Location”). The format for the genomic location is a concatenation of <chr_id><strand><start position>. For example, 19+135460000 refers chromosome 19, + strand, start position 135460000. Chromosomes 23-25 refer to chromosome X, chromosome Y and mitochondrial DNA, respectively. The chromosomal location is based on the hg17 assembly of the human genome by UCSC (http:flgenome.ucsc.edu), which is based on NCBI Build 35 version 1 (35.1) and was produced by the International Human Genome

### Sequencing Consortium.

[0251] Table 1 of U.S. patent application Ser. No. 11/429,720 also lists whether the hairpin is conserved in evolution (“C”). The hairpins were identified as conserved (“Y”) or nonconserved (“N”) by using phastCons data. The phastCons data is a measure of evolutionary conservation for each nucleotide in the human genome against the genomes of chimp, mouse, rat, dog, chicken, frog, and zebrafish, based on a phylo-HMM using best-in-genome pair wise alignment for each species based on BlastZ, followed by multiZ alignment of the 8 genomes (Siepel et al, J. Comput. Biol 11, 413-428, 2004 and Schwartz et al., Genome Res. 13, 103-107, 2003). A hairpin is listed as conserved if the average phastCons conservation score over the 7 species in any 15 nucleotide sequence within the hairpin stem is at least 0.9 (Berezikov, E. et al. Phylogenetic Shadowing and Computational Identification of Human microRNA Genes. Cell 120, 21-24, 2005). Table 1 of U.S. patent application Ser. No. 11/429,720 also lists the genomic type for each hairpin (“T”) as either intergenic (“G”), intron (“I”) or exon (“E”). Table 1 of U.S. patent application Ser. No. 11/429,720 also lists the SEQ ID NO (“MID”) for each predicted miRNA and miRNA*. Table 1 of U.S. patent application Ser. No. 11/429,720 also lists the prediction score grade for each hairpin (“P”) on a scale of 0-1 (1 the hairpin is the most reliable), as described in Hofacker et al., Monatshefte f. Chemie 125: 167-188, 1994. If the grade is zero or null, they are transformed to the lower value of PalGrade that its p-value is <0.05. Table 1 of U.S. patent application Ser. No. 11/429,720 also lists the p-value (“Pval”) calculated out of background hairpins for the values of each P scores. As shown in Table 1 of U.S. patent application Ser. No. 11/429,720, there are few instances where the Pval is >0.05. In each of these cases, the hairpins are highly conserved or they have been validated (F═Y). Table 1 of U.S. patent application Ser. No. 11/429,720 also lists whether the miRNAs were validated by expression analysis (“E”); this column was intentionally left blank. Table 1 of U.S. patent application Ser. No. 11/429,720 also lists whether the miRNAs were validated by sequencing (“S”) (Y=Yes, N=No). If there was a difference in sequences between the predicted and sequenced miRNAs, the sequenced sequence is predicted. It should be noted that failure to sequence or detect expression of a miRNA does not necessarily mean that a miRNA does not exist. Such undetected miRNAs may be expressed in tissues other than those tested. In addition, such undetected miRNAs may be expressed in the test tissues, but at a difference stage or under different condition than those of the experimental cells. Table 1 of U.S. patent application Ser. No. 11/429,720 also lists whether the miRNAs were shown to be differentially expressed (“D”) (Y=Yes, N=No) in at least one disease, as detailed in Table 2 of U.S. patent application Ser. No. 11/429,720, the contents of which are incorporated herein. Table 1 of U.S. patent application Ser. No. 11/429,720 also lists whether the miRNAs were present (“F”) (Y=Yes, N=No) in Sanger DB Release 8 (February 2005) (http://nar.oupjournals.org/) as being detected in humans or mice or predicted in humans. As discussed above, the miRNAs listed in the Sanger database are a component of the prediction algorithm and a control for the output. Table 1 of U.S. patent application Ser. No. 11/429,720 also lists a genetic location cluster (“LC”) for those hairpins that are within 5,000 nucleotides of each other. Each miRNA that has the same LC share the same genetic cluster. Table 1 of U.S. patent application Ser. No. 11/429,720 also lists a seed cluster (“SC”) to group miRNAs by their seed of 2-7 by an exact match. Each miRNA that has the same SC have the same seed. For a discussion of seed lengths of 5-6 nucleotides being sufficient for miRNA activity, see Lewis et al., Cell, 120; 15-20 (2005).

### Example 14

### Prediction of Target Genes

[0252] The predicted miRNAs from the computational screening of Example 13 were then used to predict target genes and their binding sites using two computational approaches similar to those described in U.S. Patent Application Nos. 60/522,459, 10/709,577 and 10/709,572, the contents of which are incorporated herein by reference, for predicting miRNAs.

[0253] Table 4 of U.S. patent application Ser. No. 11/429,720, the contents of which are incorporated herein by reference, lists the predicted target gene for each miRNA (MID) and its hairpin (HID) from the computational screen. The names of the target genes were taken from NCBI Reference Sequence release 16 (http://www.ncbi.nlm.nih.gov; Pruitt et al., Nucleic Acids Res, 33(1):D501-D504, 2005; Pruitt et al., Trends Genet., 16(1):44-47, 2000; and Tatusova et al., Bioinformatics, 15(7-8):536-43, 1999). Target genes were identified by having a perfect complementary match of a 7 nucleotide miRNA seed (positions 2-8) that have an “A” after the seed on the UTR and/or an exact match in the nucleotide before the seed (total=8 nucleotides). For a discussion on identifying target genes, see Lewis et al., Cell, 120: 15-20, (2005). For a discussion of the seed being sufficient for binding of a miRNA to a UTR, see Lim Lau et al., (Nature 2005) and Brenneck et al, (PLOS Biol 2005). Binding sites were then predicted using a filtered target genes dataset by including only those target genes that contained a UTR of a least 30 nucleotides. The binding site screen only considered the longest transcript when there were several transcripts per gene. A total of 16,656 transcripts were included in the dataset. Table 4 of U.S. patent application Ser. No. 11/429,720 lists the SEQ ID NO for the predicted binding sites for each target gene as predicted from each miRNA (“MID”). The sequence of the binding site includes the 20 nucleotides 5′ and 3′ of the binding site. If the binding site encompasses 2 exons, the sequence includes 20 nucleotides 5′ and 3′ of the binding site, as the ends are situated on the spliced mRNA. Table 5 of U.S. patent application Ser. No. 11/429,720, the contents of which are incorporated herein, shows the relationship between the miRNAs (“MID”)/hairpins (“HID”) and diseases by their target genes. The names of diseases are taken from OMIM. For a discussion of the rational for connecting the host gene the hairpin is located upon to disease, see Baskerville and Bartel, RNA, 11: 241-247 (2005) and Rodriguez et al., Genome Res., 14: 1902-1910 (2004). Table 5 of U.S. patent application Ser. No. 11/429,720 shows the number of miRNA target genes (“N”) that are related to the disease. Table 5 of U.S. patent application Ser. No. 11/429,720 also shows the total number of genes that are related to the disease (“T”), which is taken from the genes that were predicted to have binding sites for miRNAs. Table 5 of U.S. patent application Ser. No. 11/429,720 also shows the percentage of N out of T (“P”) and the p-value of hypergeometric analysis (“Pval”). Table 8 of U.S. patent application Ser. No. 11/429,720, the contents of which are incorporated herein, shows the disease codes for the diseases described in Table 5 of U.S. patent application Ser. No. 11/429,720 and Tables 9-11 of U.S. patent application Ser. No. 11/429,720, the contents of which are incorporated herein. For a reference of hypergeometric analysis, see Schaum's Outline of Elements of Statistics II: Inferential Statistics. Table 9 of U.S. patent application Ser. No. 11/429,720 shows the relationship between the target sequences (“Gene Name”) and disease (“Disease Code”). Table 10 of U.S. patent application Ser. No. 11/429,720 shows the relationship between the miRNAs (“MID”)/hairpins (“HID”), known SNPs and diseases. SNP were identified in the sequence of hairpins. For the miRNAs of these hairpins, all their target genes listed in Table 4 of U.S. patent application Ser. No. 11/429,720 were collected. For these genes, we checked whether they are associates to disease(s) according to OMIM. The numeric code of the relevant diseases for each miRNA according to Table 9 of U.S. patent application Ser. No. 11/429,720 are presented in Table 10 of U.S. patent application Ser. No. 11/429,720. The disease codes are taken from Table 8 of U.S. patent application Ser. No. 11/429,720. If a target gene was not related to a disease in Table 9 of U.S. patent application Ser. No. 11/429,720, SNP data is not presented. Each SNP (“SNP_Id”) is identified based on NCBI database dbSNP BUILD 124 based on NCBI Human Genome Build 35.1. The genomic location for each SNP (“SNP_location”) is also provided in a formation concatenating “<chr_id>:<start position>”. For example, “19:135460569” means chr19+strand, start position 135460569. Although the mutations are referred to as SNPs, a number of the mutations cover a few nucleotides (e.g., small insertions, deletions, micro-satellites, etc.) For a discussion on the connection between a SNP and disease, see Swibertus (Blood 1996) and Frittitta (Diabetes 2001). Table 11 of U.S. patent application Ser. No. 11/429,720 shows the relationship between miRNAs (“MID”), hairpins (“HID”), SNP identification number (“SNP_Id”), SNP location (“SNP_location”), genes and diseases. SNP identification and location are defined as described for Table 10 of U.S. patent application Ser. No. 11/429,720. The SNPs listed are only those that are located in a miRNA target gene known to be associated with a disease in the OMIM database. “Gene” indicates the name of the gene in which the SNP is located.

### Example 15

### Differential Expression of miRNAs

### 1. Sequencing

[0254] To validate the hairpins (“HID”), a number of miRNAs were evaluated by sequencing methods similar to those described in. U.S. Patent Application Nos. 60/522,459, 10/709,577 and 10/709,572, the contents of which are incorporated herein by reference. Table 3 of U.S. patent application Ser. No. 11/429,720, the contents of which are incorporated herein, shows the hairpins (“HID”) that were validated by sequencing a miRNA (“MID”) in the indicated tissue (“Tissue”). Numeric codes for the tissues are shown in Table 6 of U.S. patent application Ser. No. 11/429,720, the contents of which are incorporated herein.

### 2. Differential Expression

[0255] To confirm the hairpins and miRNAs predicted in Example 13, we detected expression in various tissues (versus controls) using the high-throughput microarrays similar to those described in U.S. Patent Application Nos. 60/522,459, 10/709,577 and 10/709,572, the contents of which are incorporated herein by reference. Microarray images were analyzed using Feature Extraction Software (Version 7.1.1, Agilent). Differential expression of the miRNAs was then analyzed in various disease tissues using similar methods described above. Table 2 of U.S. patent application Ser. No. 11/429,720 shows the ratio of disease related expression (“R”) compared to normal tissues for the indicated diseases. Disease codes for the disease are shown in Table 7 of U.S. patent application Ser. No. 11/429,720. Table 2 of U.S. patent application Ser. No. 11/429,720 also shows the statistical analysis of the normalized signal (“RPval”). The signal of each probe was set as its median intensity. Signal intensities range from background level of 400 to saturating level of 66,000. 2 channels hybridization was performed and Cy3 signals were compared to Cy5 signals, where fluor reversed chip was preformed (normal vs. disease), probe signal was set to be its average signal. Signals were normalized by first performing a logarithmic transformation (log2), followed by adapting a polynomic graph of the second degree. Following normalization, a t-test for each miRNA and disease was performed. P values were estimated based on the occurrences of such or greater signal ratios over duplicated experiments. miRNAs with a p value <0.05 are shown in Table 2 of U.S. patent application Ser. No. 11/429,720. The total number of samples (“N”) used for each analysis is also shown in Table 2 of U.S. patent application Ser. No. 11/429,720. The differential expression analysis in Table 2 of U.S. patent application Ser. No. 11/429,720 indicates that the expression of a number of the miRNAs is significantly altered in disease tissue.

### Example 16

### Biochip

### 1. Probe Printing

[0256] Dried microRNA nucleic acid probes with the sequences listed in Table 7 (SEQ ID NOs 1-4167), were dissolved in 3× sodium chloride-sodium citrate buffer (SSC)+0.001% sodium dodecyl sulfate (SDS) or 2×SSC+0.0035% SDS to a final nucleic acid concentration of 20 μM or 10 μM. The probes were then spotted (i.e., printed) on Schott Nexterion® Slide E coated microarray slides using a Genomic Solutions® BioRobotics MicroGrid II according the MicroGrid manufacturer's directions. After spotting the probes, the biochips were processed according to the microarray slide manufacturer's directions. Briefly, the biochips were rehydrated in a humidity chamber with 0.5×SSC at 42° C., immediately dried for 3 sec on a 130° C. heating block, submerged in blocking buffer (1M Tris pH9, 50 mM ethanolamine, 0.1% SDS), and incubated for 20 min at 50° C. with frequent mixing. The biochips were then rinsed twice for 1 min in nuclease-free water. Finally the biochips were dried via centrifugation.

### 2. Preparing the Biological Sample

[0257] Total RNA from fresh tissues, cell lines, formalin-fixed paraffin-embedded RNA, and fractionated RNA enriched for small RNA molecules (after using a column/gel that separates the RNA according to size) was labeled with a fluorescent dye that enabled detection of RNAs hybridized to the biochip. RNA was labeled with a single fluorophore per molecule, and labeling was uniform across different small RNA molecules. The fluorophore was enzymatically attached by RNA ligase to the 3′ end of the microRNAs in the sample. The following reagents were then mixed: RNA up to 3.5 μL, Spikes 1 μL, 10× ligation buffer (NEB) 1 μL, or RNA ligase buffer (Amersham) p-CU-Cy3/Cy5* 1 μL, DMSO 1.5 μL, RNAsine 1 μL, T4 RNA ligase (NEB) 1 μL, or RNA ligase (Amersham), DDW up to the final total volume (10 μL). *5′phosphate-rCrU-3-Cy3; 5′phosphate-rCr-U-3-Cy5 (r=ribonucleic acid nucleotide) The above mixture was incubated on a heating block for 1 hr at 4° C. followed by 1 hr at 37° C., or at 0° C. for 2-16 hr, or at 16° C. for 2-16 hr (for low RNA amount).

### 3. Hybridizing the Biochip

[0258] Briefly, labeled RNA was hybridized to the biochip as follows. 3×miRNA Hybridization Buffer from Ambion® was preheated to 70° C. for at least 5 min. A clean coverslip was placed over a printed biochip. The hybridization buffer was mixed with labeled RNAs (RNA-Cy3 labeled and RNA-Cy5 labeled) to achieve a final concentration of 1× buffer and this mixture (30 ul) was then placed on the biochip to cover the probes. Alternatively, a final concentration of 1× buffer and this mixture (110 ul) was placed on Agilent gasket slide with Agilent chamber base. The biochip was heated to 95° C. for 3 min, and then cooled to room temperature by centrifugation for 1 min at room temperature at maximum speed. Finally, the biochip was allowed to hybridize to the labeled RNA mixture for 12-16 hr at 42° C. or 48 hr (for low RNA amount) on water bath or Agilent oven. After hybridization, the biochip was washed for approximately 30 sec at room temperature, with Buffer A (1×SSC, 0.2% SDS), washed twice for 30 sec at room temperature with Buffer B (0.1×SSC), and then dried by centrifugation.

### 4. Scanning and Analyzing the Biochip

[0259] The biochip was scanned using an Agilent Microarray Scanner Bundle G2565BA, which enabled resolution of 10 μm or 5 μm at 100% power or 100% followed by 10%. The data were analyzed using SpotReader or Feature extraction software.

### Example 17

### High-Throughput Coupling of DNA Probes to Luminex Microspheres

### 5. Preparing the Coupled Luminex Beads

[0260] Carboxylated Luminex microspheres (Luminex xMap technology; Cat# L100-C (101-200)-01), or beads, are coupled to DNA probes that are amino-modified using EDC (1-ethyl-3-(3-dimethylaminopropyl) carbodiimide-HCl; Pierce. Product# 77149). DNA probes, which are reverse complements of the target miRNAs, from the mirVana miRNA probe set (Ambion; Cat# 1564) are used. The probes are 42-46 nucleotides (nt) long, of which 18-24 nt target a specific miRNA.

[0261] Coupling reactions are performed in 1.5 ml tubes and washed using a 96-well filter plate that is resistant to detergents (Multiscreen Solvinert; Millipore; Cat# MSRLN0410). A “coupling table,” which specifies how each DNA probe should be coupled to one type of bead that has a unique spectral signature, is prepared. Each probe in a coupled bead mixture can thus be uniquely identified by its signature. Probes are resuspended in DDW to a final concentration of 0.1 mM.

[0262] Beads are resuspended by vortexing and sonicating for 20 seconds. 200 μl (2.5×10⁶ beads) is taken for each reaction. The beads are centrifuged for 2 minutes at maximum speed. The supernatant is removed and the beads are resuspended in 25 μl MES buffer (0.1M, pH 4.5), and vortexed and sonicated again.

[0263] 1 μl of probe solution is added to the beads and the suspension is mixed by vortexing. 1.5 μl of freshly suspended EDC (10 mg/ml in DDW, pre-warmed to room temperature) is added to each reaction mix and the mixture is vortexed. The reaction is then incubated at room temperature in the dark for 30 minutes. 1.5 μl of fresh EDC is added again and vortexed, followed by another 30 minute incubation. Solvinert filter plates are pre-wetted with 100 μl water. The coupled reaction is then transferred from the tubes to the filter plate and a vacuum applied. 150 μl of 0.02% Tween-20 is added to coupling reaction and vacuumed twice. Two subsequent washes with 150 μl of 0.1% SDS are then performed. The coupled beads are resuspended in 50 μl of TE and thoroughly mixed. Finally, the coupled bead mixtures are transferred to 1.5 ml tubes and kept at 4° C.

[0264] Coupled bead mixtures are mixed in equal volumes into sets of 100 in which each of 100 probes is coupled with a different bead type with a unique spectral signature (i.e., 100 different types of beads). Coupled bead mixture sets are checked for the proportion of each couple via Luminex. The mix is diluted in 1.5×TMAC hybridization buffer to final concentration of 1500 beads per reaction (33 μl) from each couple.

### 6. RNA Extraction and Quality Control

[0265] RNA is isolated from paraffin embedded or frozen tissue or from body fluids (e.g. blood, urine, sputum etc.). The extraction process is optimized to insure recovery of the short length RNAs as well. At the final stage RNA is diluted in RNase-free sterile distilled deionized water (DDW).

[0266] RNA quality is estimated by measuring the RNA concentration in a Nanoprop spectrophotometer (Nanoprop Technologies ND-1000). Residual salts and organic solvents, and residual proteins are evaluated by measuring 260/230 and 260/280 nm wavelength ratios, respectively. Further quality evaluation and degradation is done by agarose (1.2%) and urea-denaturized acrylamide (13%) gels.

### 7. Small RNA Fraction Enrichment

[0267] 5 μg of RNA is diluted in 50-150 μl DDW. The RNA is applied onto YM100 column. The column is centrifuged for 25 minutes at 14,000×G, 4° C. (Microcon YM100 filter device; Millipore; Amicon; Cat # 42413). The flow-through is then precipitated with 8 μl (50 mg/ml) Glycogen, 10% volume of 3M NaOAc pH 5.2 and 3-4 volumes of 100% cold EtOH, for 1 hr at 80° C. Next, the tubes are centrifuged for 40 minutes at maximal speed, 4° C. The supernatant is discarded and the pellet is washed with 85% cold EtOH. The pellet is dried and re-suspended in DDW. Between 5 and 10% recovery is expected.

8. Chemical Labeling of miRNA Using ULS Technology

[0268] Enriched small RNA isolated from 5 μg of total RNA are biotinylated using a MicroMax labeling and detection kit (Perkin-Elmer; Cat# MP5545). “Naked” spikes (control RNA molecules with non-human sequences, 22 nt long) are added as controls for the labeling procedure (5-20 fmol per reaction). 0.5 μl of ASAP biotin reagent and 2.5 μl of ASAP labeling buffer are added. DDW is added to a final volume of 10 μl.

[0269] Reactions are well-mixed and incubated in a thermal controller (PCR machine) for 30 minutes at 85° C. and then cooled to 4° C. for 5 minutes. KREApure reaction clean-up columns are pre-warmed to room temperature for 20 minutes. Columns are pre-spun for 1 minute at maximal speed in 2 ml microtubes and placed into fresh 1.5 ml tubes. The labeling reaction is then applied to the top of the column and spun again for 1 minute at maximal speed. Flow-through is collected and may be used for hybridization or stored at −20° C.

### 9. RNA Hybridization

[0270] Each hybridization reaction contains: MicroMax-labeled miRNAs; 1-5 fmol of pre-biotinylated spikes (control RNA molecules with non-human sequence, 22 nt long with a 5′ biotin) as hybridization controls; and a mix of Luminex microspheres coupled to miRNA probe nucleic acids (i.e., a mix of coupled beads).

[0271] RNA is first diluted with TE (Tris-EDTA buffer pH 8.0; Sigma T-9285) to a final volume of 17 μl. Then a mix of coupled beads is re-suspended by vortexing and sonicating for 20 seconds. 33 μl of mix is added to RNA using 1500 coupled beads per reaction. A tube containing buffer and coupled beads alone (i.e., no RNA) is used as background. Reactions are then mixed and denatured for 5 minutes at 85° C. and subsequently hybridized overnight at 50° C. Hybridization temperatures may be increased up to 55° C. to increase specificity, but it may lower the overall signal.

### 10. Measurement Via Luminex

[0272] Hybridization reactions are transferred to a multiscreen 96-well filter plate (Millipore; Cat# MABVN1210). Vacuum is applied and 75 μl of 20 μg/ml streptavidin-R-phycoerythrin (PhycoLink; Prozyme; Cat# PJ315) diluted in X1 TMAC Hybridization Buffer is added to each well. The suspension is mixed thoroughly and transferred to a 96-well plate (Thermowell 96-well plate, Polycarbonate; Costar 6511).

[0273] The plate is placed in a Luminex xMAP reader preheated to 50° C. for 10 minutes and then analyzed by the machine. A dual laser detects bead identity and the quantity of bound material. The Luminex is set to the following specifications: Sample volume: 50 μl; Sample timeout: 100 seconds; Double discrimination gate: 7,500-20,000.

### Example 18

### High-Throughput Coupling of LNA Probes to Luminex Microspheres

[0274] Experiments are performed as in sections 1-6 of Example 17 above, but instead of using the mirVana miRNA probe set, an Exiqon LNA miRNA probe set is used. When LNA probes are used, hybridization to coupled bead mixtures is done at a temperature between 65° C. and 75° C.

### Example 19

### Sensitivity of DNA Coupled-Bead Probes

[0275] To evaluate the sensitivity of detection, “naked” spikes (control RNA molecules with non-human sequences, 22 nt long) at increasing concentrations were added to miRNA biotin labeling reactions performed as described above in Example 17 (Section 4).

### Example 20

### Sensitivity

[0276] Spikes at increasing concentration were added to miRNA labeling reaction. An Ambion probe set was used in this experiment. The system was sensitive up to 0.06 fmol miRNA and was linear at 2 orders of magnitude. Results are presented on a logarithmic scale. See FIG. 6.

[0277] Biotinylated spike at different concentration was added to miRNA hybridization reaction. Exiqon LNA probe set was used in this experiment. The system was sensitive up to 0.1 fmol miRNA and was linear in all the examined range, up to 10 fmol. Results are presented on a logarithmic scale. See FIG. 7.

### Example 21

### Specificity

[0278] Let-7a synthetic miRNA was labeled and hybridized with mix of bead coupled to different Let-7 family members. The specificity of the system was proportional and correlative to the similarity between the sequences, the number of mismatches, their position in the sequence and the nature of the mismatch (i.e., which specific nt was changed). See FIG. 8.

[0279] The same experiment was performed with increasing hybridization temperatures. As may be seen in FIG. 9, as hybridization temperature increased, nonspecific let-7c binding decreased dramatically, while the specific signal was just slightly affected.

### Example 22

### Reproducibility

[0280] Human Placenta was labeled and hybridized as described in Examples 17-19. Reproducibility of two separate experiments is presented in FIG. 10.

### Example 23

### Tissue Specific miRNA Identification

[0281] Brain and placenta RNA from fresh tissue were labeled and hybridized to couple mix. The expression profile of 100 miRNA set is presented FIGS. 11 and 12. miRNAs specific to brain or placenta, as previously described in the literature, were detected and are denoted on the figure. Results are presented on logarithmic scale.

[0282] FIG. 11 represents binding to LNA modified probes.

[0283] FIG. 12 represents the binding to non-modified DNA probes from the Ambion probe set.

### Example 24

### Cancer Tissue miRNA Expression Profiling

[0284] RNA was extracted from formalin fixed paraffin embedded lung and bladder tissues, normal and tumor. miRNA expression profile was performed as described. miRNAs with differential expression are marked on FIGS. 13a-b. The results are presented on logarithmic scale.

### Example 25

### Detailed Protocols of Other Labeling Methods

### b 1. Direct Labeling

[0285] a. Kreatech Chemical Labeling

[0286] The labeling may be performed by ULS Small RNA labeling Kit by Kreatech.

[0287] The labeling procedure is similar to what is described above (for PerkinElmer).

[0288] An optimal ratio of 1 μl reagent per 50 ng small RNA should be maintained. Preferably, at least 12.5 μg of small RNA should be used in a reaction volume of 10 μl. 1 μl of X10 buffer is added.

[0289] b. p-CU-Bio Libations

[0290] Enzymatic end labeling of dinucleotide with a biotin entity. Different ligation systems may be used.

[0291] (1) Protocol 1: NEB Ligase

| | |
|---|---|
| RNA | 5 μl |
| 3 × Ligation Buffer | 3 μl |
| p-CU-BIO | 1.5 μl |
| DTT 0.1M | 1.5 μl |
| ATP 30 mM | 0.5 μl |
| T4 RNA Ligase (NEB) | 1.5 μl |
| DDW | 2 μl |
| Total Volume | 15 μl |

[0292] Incubation for 2 hr at 30° C., following by inactivation for 3 min at 80° C. and O.N. precipitation: Increase volume to 150 μl, add 8 μl glycogen, 15 μl NaOAc, 550 μl 100% EtOH.

[0293] Resuspend in 5 μl DDW. Before Luminex add 12 μl TE (final volume 17 μl).

### Example 26

### Signal Amplification Methods

### 1. Protocol for TSA (Tyramide Signal Amplification)

[0294] Before Starting:
[0295] 1. Re-suspend bioinyl-Tyramide in 0.3 ml DMSO—stock solution (stable at 4° C. for six months).
[0296] 2. Dilute stock solution 1:50 using X1 amplification buffer (working solution).
[0297] 3. Prepare TNT wash buffer: 0.1M Tris-HCl (pH 7.5), 0.15M NaCl, 0.05% Tween-20.
[0298] 4. Prepare TNB blocking buffer: 0.1M Tris-HCl (pH=7.5), 0.15M NaCl, 0.5% blocking reagent.
   [0299] Stir and heat (not exceeding 60° C.) for complete dissolution.
   [0300] Filter solution, aliquot and store at 4° C.

[0301] Procedure:
[0302] 1. Microspheres coupling, miRNA chemical labeling and hybridization are performed as described above.
[0303] 2. Wash hybridization reaction by spinning down the sample
[0304] 3. Resuspend in 100 ul blocking buffer TNB
[0305] 4. Incubate 30 minutes at RT
[0306] 5. Spin
[0307] 6. Resuspend with 100 ul SA-HRP, diluted 1:100 in TNB.
[0308] 7. Incubate 30 minutes at RT.
[0309] 8. Load onto Millipore filter plates.
[0310] 9. Wash ×3 with TNT buffer (apply vacuum and resuspend X3)
[0311] 10. Add 100 μl of biotinyl-Tyramide working solution (dilute stock solution 1:50 using X1 amplification buffer-working solution).
[0312] 11. Mix by pipetting up and down.
[0313] 12. Incubate for 10 minutes at RT
[0314] 13. Wash with TNT ×3 (as in 10).
[0315] 14. Add SA-PE 75 ul of 20 ug/ml in TMAC.
[0316] 15. Incubate 10 minutes at 50° C.
[0317] 16. Read in luminex.

[0318] FIG. 14 shows how the TSA reaction amplifies of biotinylated spikes

### 2. Signal Amplification by Genisphere

[0319] Protocol for the use of Genisphere signal amplification kit onto the Luminex platform. (Protocol as provided by Genisphere)
[0320] 1. Enrich miRNA fraction by placing total RNA onto YM-100 column.
   [0321] a. Poly (A) Tailing of microRNA:
[0322] 2.
   [0323] a. Add naked spikes to enriched fraction of miRNA.
   [0324] b. Adjust the volume of enriched microRNA and spikes to 15.5 μl with Nuclease Free Water (Vial 10). Depending on the array quality, 50 ng to 500 ng of enriched microRNA will be required to produce quality data.
   [0325] c. Dilute the ATP (Vial 4) in 1 mM Tris pH 8.0 according to the following formula:

$$ATP dilution factor = \frac{5000}{ng of micro RNA}$$

[0326] 3. Add the following components to the 15.5 μl microRNA, for a volume of 25 μl:
   [0327] a. 5 μl 5×miRNA Reaction Buffer (Vial 2)
   [0328] b. 2.5 μl MnCl2 (Vial 3)
   [0329] c. 1 μl diluted ATP (Vial 4 dilution from step 2)
   [0330] d. 1 μl PAP Enzyme (Vial 5)
[0331] 4. Mix gently and microfuge.
[0332] 5. Incubate in a 37° C. heat block for 15 minutes.
   [0333] b. Ligation of “cplCap03” Capture Sequence to the Tailed microRNA
[0334] 6. Briefly microfuge the 25 μl of tailed microRNA.
[0335] 7. Add the following components at room temperature for a volume of 36 μl:
   [0336] a. 6 μl 6×“cplCap03” Ligation Mix (Vial 9)
   [0337] b. 2 μl T4 DNA Ligase (Vial 8)
[0338] c. 3 μl Nuclease Free Water (Vial 10)
[0339] 8. Mix gently and microfuge.
[0340] 9. Incubate at room temperature (20-28° C.) for 30 minutes.
[0341] 10. Stop the reaction by adding 4 μl of 0.5M EDTA pH 8. Briefly vortex and microfuge.
[0342] 11. Add 60 μl of 1×TE Buffer for a final volume of 100 μl. Briefly vortex and microfuge. This is the Tagged microRNA.
   [0343] c. Purification of Tagged microRNA
[0344] 12. Purify the 100 μl of Tagged microRNA using the MinElute PCR Purification Kit (Qiagen cat. no. 28006) as follows:
   [0345] a. Add 500 μl Buffer PB to the 100 μl sample and vortex. Briefly microfuge.
   [0346] b. Apply the mixture to the MinElute column and centrifuge for 1 minute at 10-14,000×g (˜13,000 rpm) in a conventional tabletop microcentrifuge
   [0347] c. Discard the flow-through. Place the MinElute column into the same collection tube
   [0348] d. Add 750 μl Buffer PE to the MinElute column and centrifuge for 1 minute.
   [0349] e. Discard the flow-through. Place the MinElute column back into the same collection tube
   [0350] f. Centrifuge for 2 minutes to remove residual PE buffer
   [0351] g. Place the MinElute column into a clean, labeled, 1.5 mL microfuge tube
   [0352] h. Add 10 μl Buffer EB to the center of the column membrane. Incubate at room temperature for 2 minutes. Centrifuge for 2 minutes. Discard column and save the 10 μl eluate. This is the Tagged microRNA.
[0353] d. Luminex Bead Binding and Detection Assay Using Tagged LMW RNA
[0354] 1. Select the appropriate coupled luminex bead sets (mix).
[0355] 2. Vortex the coupled beads by vortexing for 10-20 secs.
[0356] 3. Prepare a working Luminex bead mixture by diluting the coupled Luminex bead stocks to 1500 luminex beads (per each bead type) per run in 1.5×TMAC (4.5M TMAC) with or without formamide. (Note: 33 uL total of working luminex bead mixture is required for each reaction.) 10-30% Formamide may be added to the TMAC solution to increase the stringency of the hybridization. Vortex the beads in the TMAC buffer.
[0357] 4. Add 33 uL of the Luminex bead mixture (from step 3 above) to a nuclease free 0.2 mL strip PCR tube with cap (ISC Bioexpress Cat # T-3034-1).
[0358] 5. To each tube add 17 uL of tagged LMW RNA's (from the protocol above) diluted in 1×TE pH 8.0 including the appropriate bio-spikes. Add the equivalent of 20-150 ng of LMW RNA (as measured prior to tagging procedure). Incubate for 16 hours at 50° C. (65° C. if probes are LNA) with shaking at 300 RPM.
[0359] 6. Transfer the entire reaction from each tube to the wells of a pre-wetted (with 1×PBS) Multiscreen-BV filter plate (Millipore cat# MABVN1210).
[0360] 7. Wash the beads (in the filter plate) once with 1×TMAC (pre-warmed to 50° C.) using a vacuum manifold.
[0361] 8. Add 50 μL of biotinylated Cap03 dendrimer diluted to 1.0 ng/uL in Genisphere's Binding Buffer 1. Incubate at 37° C. for 2 hours with shaking at 300 RPM.
[0362] 9. Wash the beads once with 1×TMAC pre-warmed to 50° C.
[0363] 10. Add 50 uL of SA-PE (ProZyme) diluted to 20 ng/uL in 1×PBS. Incubate for 30 minutes at 37° C. with shaking at 300 RPM.
[0364] 11. Wash the beads 1× with 1×PBS.
[0365] 12. Add 75 μL of 1×PBS to each well and transfer the contents of the well to a separate microtiter plate.
[0366] 13. Analyze on the Luminex 100 calibrated at the low RP1 calibration.

### Optional:

### Anti-PE Biotin (Dendrimer) Reagent

[0367] We used this dendrimer reagent for further improving the sensitivity of the miRNA Luminex assays, which has resulted in the successful use of as little as 1-3 ng of LMW RNA (equivalent to 50-150 ng total RNA) per multiplex bead assay (6-12 plexes) in our hands. The additional steps for the use of the anti-PE dendrimer reagents are rather simple, and are added to the end of the current miRNA Luminex protocol (following Step 11 of the current protocol):

[0368] Step 12. Dilute the anti-PE biotin dendrimer in Binding Buffer I by adding 5.5 uL of the anti-PE biotin (dendrimer) reagent to 49.5 uL of Binding Buffer I for every bead reaction (microtiter well) desired.

[0369] Add 50 uL of the diluted anti-PE biotin dendrimer to each bead reaction in the filter microtiter plate, and incubate at RT for 60 minutes with shaking at 300 RPM.

[0370] Step 13. Wash the beads 1× with 1×PBS.

[0371] Step 14. Dilute the 50×SA-PE with 1×PBS. Add 50 uL of diluted SA-PE per well, vortex the plate for 5 seconds. Incubate for 30 minutes at 37° C. with shaking at 300 RPM.

[0372] Step 15. Wash the beads 1× with 1×PBS.

[0373] Step 16. Add 150 uL of 1×PBS to each well. Pipet the beads up and down to mix 5-6 times, then transfer the contents of the well to a separate microtiter plate.

[0374] Step 17. Analyze on the Luminex instrument.

### Example 27

### Transcription Methods

### 1. Direct Transcript

[0375] If this possibility is to be used a sense probe set of the miRNA should be coupled to the microspheres.

[0376] Direct transcript labeling method includes the ligation of a RNA; DNA hybride adaptor and the transcription using biotinilated nucleotides.
[0377] 1. Prepare the following reaction mixture:

| | | From | | |
|---|---|---|---|---|
| | Volume | stock | | Comments |
| RNA | 5 μl | 1 | ug/ul | RNA is after YM-100 |
| Spike 1 - S-01-RNA-S | 2 μl | | | 100 fmol |
| Spike 2 - S-02-RNA-S | mix of | | | 25 fmol (or create a |
| | both | | | mix with appropriate |
| | | | | fmol of both spikes |
| | | | | in 2 ul). |
| 10 × Ligation Buffer | 2.5 μl | | | From NEB |
| Adaptor | 2 μl | 100 | p/ul | Box-3-8 19578175 |
| | | | | 3ada-DT-avrII |
| DMSO | 3.7 μl | | | |
| RNasine (HPR-1) | 1 μl | 40 | U/ul | |
| T4 RNA Ligase | 1.5 μl | | | Amersham |
| DDW | 8.3 μl | | | |
| Total Vol | 25 μl | | | |

[0378] 2. Incubate at 40 min at 37° C.
[0379] 3. Stop reaction by addition of 0.5-2 volumes (12.5 ul) of loading mix (SB Urea) and than run on two phase Acrylamide Urea gel (i.e. 6% top, 13% bottom).
[0380] 4. Run on 200 volt 80 mA ˜55 min. Cut the slice out of the gel according to RNA markers, between the free adaptor and small RNA.
[0381] 5. Elute the RNA by midi GeBAflex-into 0.8 ml DDW (cut off 3500) 120 volt 40 min, and than reverse the polarity of the electric current for 120 seconds.
[0382] 6. Precipitate the RNA by adding 8 μl glycogen (5 mg/ml) to 400 μl RNA, 1/10 volume NaoAc and 3-4 volume cold ethanol 100%. Keep O/N at −20° C.
[0383] 7. Spin at max speed for 40 min, and wash with 85% ethanol. Resuspend in 3 μl. (If two tubes are used, resuspend one for 3 minutes at 65° C. and transfer to the second, wash first tube with 2 ul and pool).
[0384] 8. Add annealing primer—1 ul of probe 19578176 RT-DT-T7 avrII-short from stock 20 p/ul. Perform step wise annealing.

### Prepare Transcript Using the T7-MEGAshortscript Kit:

[0385] 1. Thaw the T7 10× Reaction Buffer, ribonucleotide solutions at room temperature. Keep the T7 Enzyme Mix on ice. Assemble the reaction at room temperature.
[0386] 2. Prepare reaction mix according to the following:

| | | |
|---|---|---|
| | From | |
| Volume | Stock | Comments |

| | |
|---|---|
| Template | 4 μl |
| T7 10X Reaction Buffer | 1 μl |
| T7 ATP Solution (75 mM) | 1 μl |
| T7 CTP Solution (75 mM) | 1 μl |
| T7 UTP Solution (75 mM) | 0.5 μl |
| T7 GTP Solution (75 mM) | 1 μl |
| UTP Bio | 0.5 μl |
| T7 Enzyme Mix | 1 μl |
| Total Volume | 10 μl |

[0387] 3. Incubate the reaction at 37° C. O.N.
[0388] 4. Spin shortly.
[0389] 5. To remove the DNA template add:
   [0390] 1 μl of DNase I., mix well, incubate at 37° C. for 15 min.
[0391] 6. Acid Phenol:chloroform extraction
   [0392] Add: 125 μl nuclease-free water, 15 μl 3 M sodium acetate, and 150 μl Acid Phenol:chloroform. Mix thoroughly. Spin at max speed for 10 min.
[0393] 7. Precipitate the RNA:
   [0394] Mix top phase in new tube with 8 μl glycogen (5 mg/ml), 3.6 volume ethanol (550 μl) Keep O/N at −20° C. (or 2 h at −80 C), Centrifuge max 40 min, Wash with 85% ethanol. and resuspend in 25 μl.
[0395] 8. Concentration:
   [0396] Determine concentration.
[0397] 9. Purify from free nucleotides.
   [0398] Load transcripts on G-25 column.
[0399] 10. Add bio-RNA spike for hybridization control:
   [0400] C-lin4-bio-AS-RNA 5f
   [0401] C-mir2-bio-AS-RNA 1f.
      For Hybridization with Luminex Mix Couples Use:
      1. 5 μg transcripts, or
      2. 0.5 μg purified transcripts.

### Example 28

### Amplification of microRNA Using SenseAmp Plus™—Genisphere

[0402] 1. Procedure (Starting from Total RNA)

[0403] a. Enrichment and Concentration of microRNA:

[0404] Microcon YM-100 column (Millipore cat. no. 42413) and a conventional tabletop microfuge.

[0405] Dilute the total RNA sample to 100 μl with 10 mM Tris-HCl, pH 8.0.

[0406] Add the 100 μl of diluted total RNA to the sample reservoir. Do not touch the membrane with the pipette tip. Secure the tube cap and centrifuge for 6 minutes at 13,000 g.

[0407] Save the flow-through material (˜95 μl). This is your LMW RNA having an average size less than 80-100 bases long.

### Concentration:

[0408] Microcon YM-3 column (Millipore cat. no. 42404) and a conventional tabletop microfuge.

[0409] Add the LMW RNA from step 3 above (˜95 μl flow-through of YM-100) to the YM-3 sample reservoir. Do not touch the membrane with the pipette tip. Secure the tube cap and centrifuge for 30 minutes at 13,000 g.

[0410] Check the volume of the flow-through and continue the centrifugation until the flow-through volume is equal to the loaded volume (˜95 μl) minus 6-8 μl or no additional liquid is accumulated in the lower reservoir. For example, if 95 μl was loaded on the YM-3 then the flow through measure 87-89 μl.

[0411] Add 10 μl of 10 mM Tris-HCl, pH 8.0 to the sample reservoir and gently mix by tapping the side.

[0412] Carefully place the sample reservoir upside down in a new collection tube. Centrifuge for 3 minutes at 13,000 g to collect the concentrated LMW RNA. Proceed to the Poly (A) Tailing of microRNA section below.

[0413] b. Poly (A) Tailing of microRNA

[0414] Adjust the volume to 18 ml with Nuclease Free Water (Vial 10).

[0415] Dilute the ATP (Vial 14) in 1 mM Tris pH 8.0 according to the following formula:

$$ATP dilution factor = \frac{250000}{ng of Total RNA ( into the YM 100 above )}$$

[0416] For example, if starting with 2000 ng miRNA, the ATP dilution factor=250000÷2000 ng=125.

[0417] Dilute the ATP 1:125 by adding 1 ml of ATP (Vial 14) to 125 ml of 1 mM Tris pH 8.0.

[0418] For samples less than 50 ng of total RNA: dilute the ATP (Vial 14) 1:5000 in 1 mM Tris pH 8.0.

[0419] Add the following components to the 18 ml microRNA, for a volume of 25 ml:

### 2.5 ml 10× Reaction Buffer (Vial 6)

### 2.5 ml 25 mM MnCl2 (Vial 17)

[0420] 1 ml diluted ATP (Vial 14 dilution from step 2)

### 1 ml PAP Enzyme (Vial 16)

[0421] Mix gently and microfuge.

[0422] Incubate in a 37° C. heat block for 15 minutes.

Reverse Transcription of Tailed microRNA

[0423] Briefly microfuge the 25 ml of tailed microRNA and place on ice.

[0424] Prepare a 1:10 dilution of SenseAmp dT primer (Vial 1) by adding 1 ml SenseAmp dT primer to 9 ml 0.1×TE. Vortex and briefly microfuge.

[0425] On ice, add 2 ml of 1:10 diluted SenseAmp dT primer (Vial 1 dilution from step 2).

[0426] Mix gently and microfuge.

[0427] Incubate at 65° C. for 10 minutes and immediately transfer to ice for 2 minutes.

[0428] Add the following components on ice, for a volume of 50 ml:
[0429] 10 ml 5× First Strand Buffer (or equivalent buffer supplied with the reverse transcriptase)
[0430] 5 ml 0.1M DTT (If supplied with the reverse transcriptase; otherwise use nuclease free water)
[0431] 2.5 ml dNTP mix (Vial 3)
[0432] 1 ml Superase-in™ RNase inhibitor (Vial 4)
[0433] 2 ml SuperScript II reverse transcriptase, 200 units (or equivalent reverse transcriptase)
[0434] 2.5 ml Nuclease Free Water (Vial 10)

[0435] Gently mix (do not vortex) and incubate at 42° C. for one hour.

[0436] Stop the reaction by adding 8.75 ml of 0.5M NaOH/50 mM EDTA. Briefly vortex and microfuge.

[0437] Note: the reaction may turn to a brown color; this is normal.

[0438] Incubate at 65° C. for 30 minutes to degrade the miRNA.

[0439] Note: the reaction may turn from brown to clear; this is normal.

[0440] Neutralize the reaction with 12.5 ml of 1M Tris pH 8.0. This is the cDNA. Briefly vortex and microfuge. Bring the sample to 100 ml by adding 28.75 ml 1×TE Buffer.

[0441] c. Purification and Concentration of cDNA

[0442] Purify the 100 μl of cDNA using a Microcon YM-100 column (Millipore cat. no. 42413) and a conventional tabletop microfuge.

[0443] Add the 100 μl cDNA to the sample reservoir. Do not touch the membrane with the pipette tip. Secure the tube cap and centrifuge for 6 minutes at 13,000 g.

[0444] Add 200 μl of 1×TE buffer to the sample reservoir without touching the membrane. Gently mix by pipetting up and down 5 times. Secure the tube cap and centrifuge for 6 minutes at 13,000 g.

[0445] Carefully separate the sample reservoir from the collection tube. Discard the flow-through. Place the YM-100 column into the same collection tube.

[0446] Add 200 μl of 1×TE buffer to the sample reservoir without touching the membrane. Gently mix by pipetting up and down 5 times. Secure the tube cap and centrifuge for 6 minutes at 13,000 g.

[0447] Carefully separate the sample reservoir from the collection tube. Discard the collection tube.

[0448] Add 5 μl 1 mM Tris pH 8.0 to the sample reservoir without touching the membrane. Gently tap the side of the reservoir to mix.

[0449] Carefully place the sample reservoir upside down in a new collection tube. Centrifuge for 3 minutes at 13,000 g.

[0450] Note the volume of cDNA collected in the bottom of the tube (5-10 μl). Bring the volume of cDNA to 10 μl with Nuclease Free Water (Vial 10).

Tailing of First Strand cDNA

[0451] Heat purified cDNA (10 ml) to 80° C. for 10 minutes. Put on ice immediately for 1-2 minutes. Briefly microfuge and return to ice.

[0452] For each reaction, prepare a Master Mix (10 ml) in a separate tube on ice:
[0453] 2 ml 10× Reaction Buffer (Vial 6)
[0454] 2 ml Nuclease Free Water (Vial 10)
[0455] 4 ml 10 mM dTTP (Vial 5)
[0456] 2 ml TdT Enzyme (Vial 7)

[0457] Combine the Master Mix and the cDNA for a volume of 20 ml. Mix gently and microfuge.

[0458] Incubate in a 37° C. heat block for 3 minutes. Do not exceed 3 minutes.

[0459] Stop the reaction by heating to 80° C. for 10 minutes. Briefly microfuge and cool to room temperature for 1-2 minutes.

[0460] d. T7 Promoter Synthesis

[0461] Add 2 ml of SenseAmp T7 Template Oligo (Vial 8) to the tailed cDNA for a volume of 22 ml. Briefly vortex and microfuge.

[0462] Incubate at 37° C. for 10 minutes to anneal the strands.

[0463] To each reaction, add the following components for a volume of 25 ml:
[0464] 1 ml 10× Reaction Buffer (Vial 6)
[0465] 1 ml dNTP mix (Vial 3)
[0466] 1 ml Klenow Enzyme (Vial 9)

[0467] Mix gently and microfuge. Incubate at room temperature for 30 minutes.

[0468] Stop the reaction by heating to 65° C. for 10 minutes. Place on ice.

[0469] Proceed to the In Vitro Transcription reaction using half (12.5 ml) of the promoter-modified cDNA. Save the remaining modified cDNA at −20° C. for future use or for use in a parallel amplification reaction.

[0470] e. In Vitro Transcription

[0471] Incubate the 12.5 ml of cDNA at 37° C. for 10 minutes to re-anneal the strands.

[0472] Thaw the T7 Nucleotide Mix (Vial 11) and 10×T7 Reaction Buffer (Vial 12) at room temperature, and keep at room temperature until use. Thoroughly vortex the 10×T7 Reaction Buffer (Vial 12) to avoid precipitation of certain buffer components.

[0473] For each reaction, add the following components to the 12.5 ml of cDNA at room temperature, for a final volume of 25 ml:

### 8.0 ml T7 Nucleotide Mix (Vial 11)

### 2.5 ml 10×T7 Reaction Buffer (Vial 12)

### 2.0 ml T7 Enzyme Mix (Vial 13)

[0474] Mix gently and microfuge. Incubate in a themalcycler (with heated lid) at 37° C. for 4-16 hours. Or, place the reaction in a 37° C. heat block for 5 minutes and then transfer to a 37° C. air hybridization oven for 4-16 hours. It is essential to avoid evaporation and condensation of the reaction during this step.

[0475] f. Purification of senseRNA

[0476] Purify the senseRNA using the RNeasy MinElute Kit (Qiagen cat. no. 74204) following Qiagen's protocol for RNA Cleanup. To elute, add 14 ml Nuclease Free Water, incubate for two minutes, and then spin. The recovered volume should be approximately 12 ml.

[0477] g. Quantitation of senseRNA

[0478] Determine the concentration of the senseRNA using the RiboGreen RNA Quantitation Kit (Molecular Probes cat. no. R-11490). Use the Ribosomal RNA standard provided with the kit to prepare a standard curve. Use 1 μl of the purified senseRNA to quantitate. Be sure to use an appropriate reference “blank” sample to avoid inaccurate concentration determination.

### Example 29

### High Throughput Coupling of Probes to Beads—Using EDC

[0479] Buffers: MES buffer, 0.1M (pH=4.5), Tween-20, 0.02%, SDS, 0.1%, TE (pH=8.0)

### 1. Coupling Protocol

[0480] Coupling is preformed between carboxylated beads and amine modified probes using EDC.

[0481] Coupling is performed in tubes and washed using a 96 multiwell filter plate, resistant for detergents (Solvinert by Millipore).
[0482] 1. Re-suspended all probes in DDW to a final concentration of 1 mM.
[0483] 2. Prepare a 1:10 dilution of all probes in DDW (0.1 mM)
[0484] 3. EDC aliquots powder should reach room temp.
[0485] 4. Prepare a coupling table of the coupling reactions to performed.
[0486] 5. Prepare a set of designated tubes.
[0487] 6. Re-suspend beads by vortex and sonication for about 20 seconds in original tube.
[0488] 7. Transfer 200 ul from each bead type to the new designated tube (2.5×10⁶ beads).
[0489] 8. Spin at max speed for 2 minutes
[0490] 9. Remove sup and re-suspend in 25 ul MES pH=4.5. Vortex and sonicate for 20 seconds.
[0491] 10. Add 1 ul of diluted probe to bead. Use pre-made table to get the appropriate bead probe couple.
[0492] 11. Mix by vortex.
[0493] 12. Prepare EDC by suspending 10 mg aliquot with 1 ml DDW to create concentration of 10 mg/ml.
[0494] 13. Add 1.5 ul of EDC to each couple reaction, vortex.
[0495] 14. Incubate at room temp, in dark 30 minutes.
[0496] 15. Prepare a new suspended EDC aliquot.
[0497] 16. Add 1.5 ul of fresh EDC again to each, vortex.
[0498] 17. Incubate at room temp, in dark 30 minutes.
[0499] 18. Pre-wet Solvinert filter plates with 100 μl water. (Millipore).
[0500] 19. Transfer content of couples from tubes to filter plate according to pre-made table.
[0501] 20. Add 150 μl of 0.02% Tween-20 to the couple's reaction.
[0502] 21. Place plate onto vacuum apparatus and apply vacuum.
[0503] 22. Add 150 μl of 0.02% Tween-20 again to the couple's reaction.
[0504] 23. Apply vacuum again.
[0505] 24. Add 150 μl of 0.1% SDS, and apply vacuum.
[0506] 25. Add 150 μl of 0.1% SDS again, and apply vacuum again.
[0507] 26. Re-suspend coupled beads in 50 μl TE, pH=8.0, mix by pipeting up and down.
[0508] 27. Transfer couples to a new 96 well plate (no filter), or to new tubes and keep at 4° C.
   2. Chemical Labeling of miRNA—MicroMax ASAP (Accurate, Sensitive, and Precise) Labeling Kit

### Procedure

[0509] 1. Small RNA is isolated from 5 μg total RNA by YM-100.
[0510] 2. Add naked spikes set.
[0511] 3. Add 0.5 μl ASAP biotin reagent
[0512] 4. Add 2.5 μl ASAP labeling buffer.
[0513] 5. Add DDW to final volume of 10 μl
[0514] 6. Mix by pipetting.
[0515] 7. Incubate for 30 minutes at 85° C.
[0516] 8. Cool to 4° C. for 5 minutes (use PCR machine).
[0517] 9. Purify labeled miRNA using the Kreapure columns:
   [0518] a. Let columns reach room temp (20 minutes)
   [0519] b. Shake to pull resin to the bottom
   [0520] c. Break the bottom and place in 2 ml microtube.
   [0521] d. Loosen the cap and pre-spin for 1 minute 14,000 rpm.
   [0522] e. Place the column in a fresh microtube
   [0523] f. Apply the labeling reaction on top of the raisin bed.
   [0524] g. Spin at 14,000 for 1 minute.
   [0525] h. Collect the flow through and store at −20° C. or use from hybridization.

### 3. Luminex Hybridization Protocol

### 17 ul Labeled Material:

| | |
|---|---|
| Labeled RNA | +33ul Mix beads |
| 2ul Bio-Spikes | (in X1.5 TMAC). 1500 beads/reaction |

Complete volume to 17ul with X1 TE

[0527] 1. Resuspend microspheres by vortex and sonication for approximately 20 seconds.
[0528] 2. To each sample or background well add 33 μL of Working Microsphere mix. Reaction is preformed in 0.5 ml tubes.
[0529] 3. To each background well add 17 μL TE, pH 8.
[0530] 4. To each sample well add examined material that includes labeling and pre-biotinelated spikes, and add TE pH 8.0 to a total volume of 17 μL.
[0531] 5. Mix reaction wells gently by pipetting up and down several times.
[0532] 6. Place tubes in PCR-100 machine (Programmable Thermal controller) at 85° C. for 5 minutes to denature any secondary structure in the sample. Incubate the reaction tubes at 50° C. (hybridization temperature) over night.
[0533] 7. Transfer the samples into 96 well filter plate. Apply vacuum.
[0534] 8. Prepare fresh reporter mix by diluting streptavidin-R-phycoerythrin sample (PhycoLink-SteptAvidin. Cat# PJ315) to 20 μg/ml in 1×TMAC Hybridization Buffer.
[0535] 9. Add 75 μl of reporter mix to each well and mix gently by pipetting up and down several times, and transfer to PCR plate.
[0536] 10. Return the sample plate to hybridization temperature 50° C. in Luminex machine for 10 minutes.
[0537] 11. Analyze 50 μl at hybridization temperature on the Luminex analyzer according to the system manual.

### REFERENCES

[0538] 1. Chen C, Ridzon D A, Broomer A J, Zhou Z, Lee D H, Nguyen J T, Barbisin M, Xu N L, Mahuvakar V R, Andersen M R, Lao K Q, Livak K J, Guegler K J. Real-time quantification of microRNAs by stem-loop RT-PCR. Nucleic Acids Res. 2005 Nov. 27; 33(20):e179.
[0539] 2. Fu H J, Zhu J, Yang M, Zhang Z Y, Tie Y, Jiang H, Sun Z X, Zheng X F. A novel method to monitor the expression of microRNAs. Mol. Biotechnol. 2006 March; 32(3): 197-204.
[0540] 3. Shi R, Chiang V L. Facile means for quantifying microRNA expression by real-time PCR. Biotechniques. 2005 October; 39(4):519-25.
[0541] 4. Tang F, Hajkova P, Barton S C, Lao K, Surani M A. MicroRNA expression profiling of single whole embryonic stem cells. Nucleic Acids Res. 2006 Jan. 24; 34(2):e9.

The application's sequence listing, which the Patent Office published only in electronic form, follows.

SEQUENCE LISTING (21063 sequences)

SEQ ID NO: 1 - RNA, 23 nt, Anopheles gambiae
ugagaucacuuugaaagcugauu

SEQ ID NO: 2 - RNA, 21 nt, Anopheles gambiae
ugagguaguugguuguauagu

SEQ ID NO: 3 - RNA, 22 nt, Anopheles gambiae
uggaauguaaagaaguauggag

SEQ ID NO: 4 - RNA, 21 nt, Anopheles gambiae
acccuguagauccgaauuugu

SEQ ID NO: 5 - RNA, 22 nt, Anopheles gambiae
aacccguagauccgaacuugug

SEQ ID NO: 6 - RNA, 23 nt, Anopheles gambiae
uaaggcacgcggugaaugccaag

SEQ ID NO: 7 - RNA, 22 nt, Anopheles gambiae
ucccugagacccuaacuuguga

SEQ ID NO: 8 - RNA, 22 nt, Anopheles gambiae
uugguccccuucaaccagcugu

SEQ ID NO: 9 - RNA, 22 nt, Anopheles gambiae
uaucacagccauuuugacgagu

SEQ ID NO: 10 - RNA, 21 nt, Anopheles gambiae
ucagucuuuuucucucuccua

SEQ ID NO: 11 - RNA, 21 nt, Anopheles gambiae
uggacggagaacugauaaggg

SEQ ID NO: 12 - RNA, 23 nt, Anopheles gambiae
gcucaucaaagcuggcugugaua

SEQ ID NO: 13 - RNA, 21 nt, Anopheles gambiae
uugugcgugugacaacggcua

SEQ ID NO: 14 - RNA, 23 nt, Anopheles gambiae
ugauuguccaaacgcaauucuug

SEQ ID NO: 15 - RNA, 24 nt, Anopheles gambiae
uguaauggcacuggaagaauucac

SEQ ID NO: 16 - RNA, 23 nt, Anopheles gambiae
ucagguaccugaaguagcgcgcg

SEQ ID NO: 17 - RNA, 23 nt, Anopheles gambiae
cagcgagguauagaguuccuacg

SEQ ID NO: 18 - RNA, 23 nt, Anopheles gambiae
uaaaugcacuaucugguacgaca

SEQ ID NO: 19 - RNA, 22 nt, Anopheles gambiae
ucggugggacuuucguccguuu

SEQ ID NO: 20 - RNA, 22 nt, Anopheles gambiae
ugacuagauccacacucauuaa

SEQ ID NO: 21 - RNA, 23 nt, Anopheles gambiae
ugucauggaauugcucucuuuau

SEQ ID NO: 22 - RNA, 28 nt, Anopheles gambiae
aaucuagccucuucuaggcuuugucugu

SEQ ID NO: 23 - RNA, 21 nt, Anopheles gambiae
uaaauaucagcugguaauucu

SEQ ID NO: 24 - RNA, 23 nt, Anopheles gambiae
auuguacuucaucaggugcucug

SEQ ID NO: 25 - RNA, 20 nt, Anopheles gambiae
ucacaaccuccuugagugag

SEQ ID NO: 26 - RNA, 22 nt, Anopheles gambiae
aaucacaggaguauacugugag

SEQ ID NO: 27 - RNA, 22 nt, Anopheles gambiae
uuuugauuguugcucagaaagc

SEQ ID NO: 28 - RNA, 25 nt, Anopheles gambiae
ugaacacaucuggugguaucucagu

SEQ ID NO: 29 - RNA, 23 nt, Anopheles gambiae
uggaagacuagugauuuuguugu

SEQ ID NO: 30 - RNA, 22 nt, Anopheles gambiae
uaaagcuagauuaccaaagcau

SEQ ID NO: 31 - RNA, 23 nt, Anopheles gambiae
uaauacugucagguaaagauguc

SEQ ID NO: 32 - RNA, 22 nt, Anopheles gambiae
uauugcacuugucccggccuau

SEQ ID NO: 33 - RNA, 22 nt, Anopheles gambiae
aauugcacuugucccggccugc

SEQ ID NO: 34 - RNA, 23 nt, Anopheles gambiae
ucuuugguuaucuagcuguauga

SEQ ID NO: 35 - RNA, 23 nt, Anopheles gambiae
acuuuggugauuuuagcuguaug

SEQ ID NO: 36 - RNA, 22 nt, Anopheles gambiae
ucuuugguauucuagcuguaga

SEQ ID NO: 37 - RNA, 22 nt, Anopheles gambiae
acguauacugaauguauccuga

SEQ ID NO: 38 - RNA, 22 nt, Ateles geoffroyi
aacccguagauccgaacuugug

SEQ ID NO: 39 - RNA, 22 nt, Ateles geoffroyi
uacaguacugugauaacugaag

SEQ ID NO: 40 - RNA, 23 nt, Ateles geoffroyi
agcagcauuguacagggcuauga

SEQ ID NO: 41 - RNA, 24 nt, Ateles geoffroyi
aaaagugcuuacagugcagguagc

SEQ ID NO: 42 - RNA, 21 nt, Ateles geoffroyi
uaaagugcugacagugcagau

SEQ ID NO: 43 - RNA, 23 nt, Ateles geoffroyi
uacccuguagauccgaauuugug

SEQ ID NO: 44 - RNA, 22 nt, Ateles geoffroyi
uuaaggcacgcggugaaugcca

SEQ ID NO: 45 - RNA, 22 nt, Ateles geoffroyi
ucccugagacccuaacuuguga

SEQ ID NO: 46 - RNA, 22 nt, Ateles geoffroyi
ucggauccgucugagcuuggcu

SEQ ID NO: 47 - RNA, 22 nt, Ateles geoffroyi
ucacagugaaccggucucuuuu

SEQ ID NO: 48 - RNA, 22 nt, Ateles geoffroyi
uugguccccuucaaccagcugu

SEQ ID NO: 49 - RNA, 23 nt, Ateles geoffroyi
uauggcuuuuuauuccuauguga

SEQ ID NO: 50 - RNA, 22 nt, Ateles geoffroyi
uagcagcacauaaugguuugug

SEQ ID NO: 51 - RNA, 22 nt, Ateles geoffroyi
uagcagcacaucaugguuuaca

SEQ ID NO: 52 - RNA, 22 nt, Ateles geoffroyi
uagcagcacguaaauauuggcg

SEQ ID NO: 53 - RNA, 20 nt, Ateles geoffroyi
acugcagugaaggcacuugu

SEQ ID NO: 54 - RNA, 24 nt, Ateles geoffroyi
caaagugcuuacagugcagguagu

SEQ ID NO: 55 - RNA, 22 nt, Ateles geoffroyi
uaaggugcaucuagugcagaua

SEQ ID NO: 56 - RNA, 22 nt, Ateles geoffroyi
uguaacagcaacuccaugugga

SEQ ID NO: 57 - RNA, 22 nt, Ateles geoffroyi
uagguaguuucauguuguuggg

SEQ ID NO: 58 - RNA, 22 nt, Ateles geoffroyi
uucaccaccuucuccacccagc

SEQ ID NO: 59 - RNA, 19 nt, Ateles geoffroyi
gguccagaggggagcuagg

SEQ ID NO: 60 - RNA, 23 nt, Ateles geoffroyi
ugugcaaaucuaugcaaaacuga

SEQ ID NO: 61 - RNA, 23 nt, Ateles geoffroyi
ugugcaaauccaugcaaaacuga

SEQ ID NO: 62 - RNA, 22 nt, Ateles geoffroyi
uaaagugcuuauagugcaggua

SEQ ID NO: 63 - RNA, 22 nt, Ateles geoffroyi
uccuucauuccaccggagucug

SEQ ID NO: 64 - RNA, 22 nt, Ateles geoffroyi
uagcuuaucagacugauguuga

SEQ ID NO: 65 - RNA, 21 nt, Ateles geoffroyi
acagcaggcacagacaggcag

SEQ ID NO: 66 - RNA, 21 nt, Ateles geoffroyi
uugugcuugaucuaaccaugu

SEQ ID NO: 67 - RNA, 22 nt, Ateles geoffroyi
aagcugccaguugaagaacugu

SEQ ID NO: 68 - RNA, 24 nt, Ateles geoffroyi
agcuacaucuggcuacugggucuc

SEQ ID NO: 69 - RNA, 21 nt, Ateles geoffroyi
aucacauugccagggauuucc

SEQ ID NO: 70 - RNA, 22 nt, Ateles geoffroyi
uucacaguggcuaaguuccgcc

SEQ ID NO: 71 - RNA, 22 nt, Ateles geoffroyi
aaggagcucacagucuauugag

SEQ ID NO: 72 - RNA, 22 nt, Ateles geoffroyi
cuagcaccaucugaaaucgguu

SEQ ID NO: 73 - RNA, 20 nt, Ateles geoffroyi
uagcaccauuugaaaucagu

SEQ ID NO: 74 - RNA, 21 nt, Ateles geoffroyi
uguaaacauccuacacucagc

SEQ ID NO: 75 - RNA, 22 nt, Ateles geoffroyi
uggcagugucuuagcugguugu

SEQ ID NO: 76 - RNA, 23 nt, Ateles geoffroyi
ucuuugguuaucuagcuguauga

SEQ ID NO: 77 - RNA, 22 nt, Ateles geoffroyi
uauugcacuugucccggccugu

SEQ ID NO: 78 - RNA, 22 nt, Ateles geoffroyi
aaagugcuguucgugcagguag

SEQ ID NO: 79 - RNA, 22 nt, Ateles geoffroyi
ugagguaguaaguuguauuguu

SEQ ID NO: 80 - RNA, 23 nt, Apis mellifera
ugagaucauugugaaagcugauu

SEQ ID NO: 81 - RNA, 22 nt, Apis mellifera
uggaauguaaagaaguauggag

SEQ ID NO: 82 - RNA, 23 nt, Apis mellifera
ugaguauuacaucagguacuggu

SEQ ID NO: 83 - RNA, 23 nt, Apis mellifera
uaaggcacgcggugaaugccaag

SEQ ID NO: 84 - RNA, 22 nt, Apis mellifera
ccccugagacccuaacuuguga

SEQ ID NO: 85 - RNA, 22 nt, Apis mellifera
uugguccccuucaaccagcugu

SEQ ID NO: 86 - RNA, 22 nt, Apis mellifera
uggacggagaacugauaagggc

SEQ ID NO: 87 - RNA, 23 nt, Apis mellifera
uaucacagccagcuuugaugagc

SEQ ID NO: 88 - RNA, 21 nt, Apis mellifera
uugugcgugugacagcggcua

SEQ ID NO: 89 - RNA, 23 nt, Apis mellifera
ugauuguccaaacgcaauucuug

SEQ ID NO: 90 - RNA, 24 nt, Apis mellifera
guaaauggcacuggaagaauucac

SEQ ID NO: 91 - RNA, 22 nt, Apis mellifera
uaggaacuucauaccgugcucu

SEQ ID NO: 92 - RNA, 23 nt, Apis mellifera
uaaaugcacuaucugguacgaca

SEQ ID NO: 93 - RNA, 22 nt, Apis mellifera
ucggugggacuuucguccguuu

SEQ ID NO: 94 - RNA, 23 nt, Apis mellifera
ugucauggaguugcucucuuugu

SEQ ID NO: 95 - RNA, 28 nt, Apis mellifera
gauuuagccucuccuaggcuuugucugu

SEQ ID NO: 96 - RNA, 23 nt, Apis mellifera
auuguacuucaucaggugcucug

SEQ ID NO: 97 - RNA, 22 nt, Apis mellifera
uuuugauuguugcucagaaagc

SEQ ID NO: 98 - RNA, 25 nt, Apis mellifera
ugaacacagcuggugguaucucagu

SEQ ID NO: 99 - RNA, 23 nt, Apis mellifera
uggaagacuagugauuuuguugu

SEQ ID NO: 100 - RNA, 23 nt, Apis mellifera
uaauacugucagguaaagauguc

SEQ ID NO: 101 - RNA, 23 nt, Apis mellifera
ucuuugguuaucuagcuguauga

SEQ ID NO: 102 - RNA, 23 nt, Apis mellifera
gcuuugguaaucuagcuuuauga

SEQ ID NO: 103 - RNA, 22 nt, Apis mellifera
acguauacugaauguauccuga

SEQ ID NO: 104 - RNA, 20 nt, Arabidopsis thaliana
ugacagaagagagugagcac

SEQ ID NO: 105 - RNA, 20 nt, Arabidopsis thaliana
ugacagaagagagugagcac

SEQ ID NO: 106 - RNA, 20 nt, Arabidopsis thaliana
ugacagaagagagugagcac

SEQ ID NO: 107 - RNA, 20 nt, Arabidopsis thaliana
ugacagaagagagugagcac

SEQ ID NO: 108 - RNA, 20 nt, Arabidopsis thaliana
ugacagaagagagugagcac

SEQ ID NO: 109 - RNA, 20 nt, Arabidopsis thaliana
ugacagaagagagugagcac

SEQ ID NO: 110 - RNA, 21 nt, Arabidopsis thaliana
cgacagaagagagugagcaca

SEQ ID NO: 111 - RNA, 21 nt, Arabidopsis thaliana
uugacagaagaaagagagcac

SEQ ID NO: 112 - RNA, 21 nt, Arabidopsis thaliana
uugacagaagauagagagcac

SEQ ID NO: 113 - RNA, 21 nt, Arabidopsis thaliana
uugacagaagauagagagcac

SEQ ID NO: 114 - RNA, 21 nt, Arabidopsis thaliana
uugacagaagauagagagcac

SEQ ID NO: 115 - RNA, 20 nt, Arabidopsis thaliana
ugacagaagauagagagcac

SEQ ID NO: 116 - RNA, 20 nt, Arabidopsis thaliana
ucccaaauguagacaaagca

SEQ ID NO: 117 - RNA, 20 nt, Arabidopsis thaliana
ccccaaauguagacaaagca

SEQ ID NO: 118 - RNA, 21 nt, Arabidopsis thaliana
uuuggauugaagggagcucua

SEQ ID NO: 119 - RNA, 21 nt, Arabidopsis thaliana
uuuggauugaagggagcucuu

SEQ ID NO: 120 - RNA, 21 nt, Arabidopsis thaliana
uuuggauugaagggagcuccu

SEQ ID NO: 121 - RNA, 21 nt, Arabidopsis thaliana
ugccuggcucccuguaugcca

SEQ ID NO: 122 - RNA, 21 nt, Arabidopsis thaliana
ugccuggcucccuguaugcca

SEQ ID NO: 123 - RNA, 21 nt, Arabidopsis thaliana
ugccuggcucccuguaugcca

SEQ ID NO: 124 - RNA, 21 nt, Arabidopsis thaliana
uugaaagugacuacaucgggg

SEQ ID NO: 125 - RNA, 21 nt, Arabidopsis thaliana
ucgauaaaccucugcauccag

SEQ ID NO: 126 - RNA, 21 nt, Arabidopsis thaliana
ucgauaaaccucugcauccag

SEQ ID NO: 127 - RNA, 24 nt, Arabidopsis thaliana
uugaagaggacuuggaacuucgau

SEQ ID NO: 128 - RNA, 21 nt, Arabidopsis thaliana
uggagaagcagggcacgugca

SEQ ID NO: 129 - RNA, 21 nt, Arabidopsis thaliana
uggagaagcagggcacgugca

SEQ ID NO: 130 - RNA, 21 nt, Arabidopsis thaliana
uggagaagcagggcacgugcg

SEQ ID NO: 131 - RNA, 21 nt, Arabidopsis thaliana
ucggaccaggcuucauccccc

SEQ ID NO: 132 - RNA, 21 nt, Arabidopsis thaliana
ucggaccaggcuucauccccc

SEQ ID NO: 133 - RNA, 21 nt, Arabidopsis thaliana
ucggaccaggcuucauucccc

SEQ ID NO: 134 - RNA, 21 nt, Arabidopsis thaliana
ucggaccaggcuucauucccc

SEQ ID NO: 135 - RNA, 21 nt, Arabidopsis thaliana
ucggaccaggcuucauucccc

SEQ ID NO: 136 - RNA, 21 nt, Arabidopsis thaliana
ucggaccaggcuucauucccc

SEQ ID NO: 137 - RNA, 21 nt, Arabidopsis thaliana
ucggaccaggcuucauucccc

SEQ ID NO: 138 - RNA, 21 nt, Arabidopsis thaliana
ucggaccaggcuucauucccc

SEQ ID NO: 139 - RNA, 21 nt, Arabidopsis thaliana
ucggaccaggcuucauucccc

SEQ ID NO: 140 - RNA, 21 nt, Arabidopsis thaliana
ugaagcugccagcaugaucua

SEQ ID NO: 141 - RNA, 21 nt, Arabidopsis thaliana
ugaagcugccagcaugaucua

SEQ ID NO: 142 - RNA, 21 nt, Arabidopsis thaliana
uuaagcugccagcaugaucuu

SEQ ID NO: 143 - RNA, 22 nt, Arabidopsis thaliana
ugaagcugccagcaugaucugg

SEQ ID NO: 144 - RNA, 21 nt, Arabidopsis thaliana
ucgcuuggugcaggucgggaa

SEQ ID NO: 145 - RNA, 21 nt, Arabidopsis thaliana
ucgcuuggugcaggucgggaa

SEQ ID NO: 146 - RNA, 21 nt, Arabidopsis thaliana
cagccaaggaugacuugccga

SEQ ID NO: 147 - RNA, 21 nt, Arabidopsis thaliana
cagccaaggaugacuugccgg

SEQ ID NO: 148 - RNA, 21 nt, Arabidopsis thaliana
cagccaaggaugacuugccgg

SEQ ID NO: 149 - RNA, 21 nt, Arabidopsis thaliana
ugagccaaggaugacuugccg

SEQ ID NO: 150 - RNA, 21 nt, Arabidopsis thaliana
ugagccaaggaugacuugccg

SEQ ID NO: 151 - RNA, 21 nt, Arabidopsis thaliana
ugagccaaggaugacuugccg

SEQ ID NO: 152 - RNA, 21 nt, Arabidopsis thaliana
ugagccaaggaugacuugccg

SEQ ID NO: 153 - RNA, 21 nt, Arabidopsis thaliana
uccggcaaguugaccuuggcu

SEQ ID NO: 154 - RNA, 21 nt, Arabidopsis thaliana
uagccaaggaugacuugccug

SEQ ID NO: 155 - RNA, 21 nt, Arabidopsis thaliana
uagccaaggaugacuugccug

SEQ ID NO: 156 - RNA, 21 nt, Arabidopsis thaliana
uagccaaggaugacuugccug

SEQ ID NO: 157 - RNA, 21 nt, Arabidopsis thaliana
uagccaaggaugacuugccug

SEQ ID NO: 158 - RNA, 21 nt, Arabidopsis thaliana
uagccaaggaugacuugccug

SEQ ID NO: 159 - RNA, 21 nt, Arabidopsis thaliana
uagccaaggaugacuugccug

SEQ ID NO: 160 - RNA, 21 nt, Arabidopsis thaliana
uagccaaggaugacuugccug

SEQ ID NO: 161 - RNA, 21 nt, Arabidopsis thaliana
ugauugagccgugucaauauc

SEQ ID NO: 162 - RNA, 21 nt, Arabidopsis thaliana
ugauugagccgcgccaauauc

SEQ ID NO: 163 - RNA, 21 nt, Arabidopsis thaliana
uugagccgugccaauaucacg

SEQ ID NO: 164 - RNA, 21 nt, Arabidopsis thaliana
uugagccgugccaauaucacg

SEQ ID NO: 165 - RNA, 21 nt, Arabidopsis thaliana
agaaucuugaugaugcugcau

SEQ ID NO: 166 - RNA, 21 nt, Arabidopsis thaliana
agaaucuugaugaugcugcau

SEQ ID NO: 167 - RNA, 20 nt, Arabidopsis thaliana
gcagcaccauuaagauucac

SEQ ID NO: 168 - RNA, 21 nt, Arabidopsis thaliana
agaaucuugaugaugcugcag

SEQ ID NO: 169 - RNA, 21 nt, Arabidopsis thaliana
agaaucuugaugaugcugcag

SEQ ID NO: 170 - RNA, 21 nt, Arabidopsis thaliana
ggaaucuugaugaugcugcau

SEQ ID NO: 171 - RNA, 22 nt, Arabidopsis thaliana
uucgcuugcagagagaaaucac

SEQ ID NO: 172 - RNA, 20 nt, Arabidopsis thaliana
uuggacugaagggagcuccc

SEQ ID NO: 173 - RNA, 20 nt, Arabidopsis thaliana
uuggacugaagggagcuccc

SEQ ID NO: 174 - RNA, 20 nt, Arabidopsis thaliana
uuggacugaagggagcuccu

SEQ ID NO: 175 - RNA, 21 nt, Arabidopsis thaliana
aagcucaggagggauagcgcc

SEQ ID NO: 176 - RNA, 21 nt, Arabidopsis thaliana
aagcucaggagggauagcgcc

SEQ ID NO: 177 - RNA, 21 nt, Arabidopsis thaliana
uucgcaggagagauagcgcca

SEQ ID NO: 178 - RNA, 21 nt, Arabidopsis thaliana
uccaaagggaucgcauugauc

SEQ ID NO: 179 - RNA, 21 nt, Arabidopsis thaliana
uccaaagggaucgcauugauc

SEQ ID NO: 180 - RNA, 20 nt, Arabidopsis thaliana
uuggcauucuguccaccucc

SEQ ID NO: 181 - RNA, 20 nt, Arabidopsis thaliana
uuggcauucuguccaccucc

SEQ ID NO: 182 - RNA, 21 nt, Arabidopsis thaliana
cugaaguguuugggggaacuc

SEQ ID NO: 183 - RNA, 21 nt, Arabidopsis thaliana
cugaaguguuuggggggacuc

SEQ ID NO: 184 - RNA, 21 nt, Arabidopsis thaliana
cugaaguguuuggggggacuc

SEQ ID NO: 185 - RNA, 21 nt, Arabidopsis thaliana
cugaaguguuugggggaacuc

SEQ ID NO: 186 - RNA, 21 nt, Arabidopsis thaliana
cugaaguguuugggggaacuc

SEQ ID NO: 187 - RNA, 21 nt, Arabidopsis thaliana
cugaaguguuuggggggacuc

SEQ ID NO: 188 - RNA, 21 nt, Arabidopsis thaliana
uuccacagcuuucuugaacug

SEQ ID NO: 189 - RNA, 21 nt, Arabidopsis thaliana
uuccacagcuuucuugaacuu

SEQ ID NO: 190 - RNA, 21 nt, Arabidopsis thaliana
ucauugagugcagcguugaug

SEQ ID NO: 191 - RNA, 21 nt, Arabidopsis thaliana
ucauugagugcaucguugaug

SEQ ID NO: 192 - RNA, 21 nt, Arabidopsis thaliana
uguguucucaggucaccccuu

SEQ ID NO: 193 - RNA, 21 nt, Arabidopsis thaliana
uguguucucaggucaccccug

SEQ ID NO: 194 - RNA, 21 nt, Arabidopsis thaliana
uguguucucaggucaccccug

SEQ ID NO: 195 - RNA, 21 nt, Arabidopsis thaliana
ugccaaaggagauuugcccug

SEQ ID NO: 196 - RNA, 21 nt, Arabidopsis thaliana
ugccaaaggagaguugcccug

SEQ ID NO: 197 - RNA, 21 nt, Arabidopsis thaliana
ugccaaaggagaguugcccug

SEQ ID NO: 198 - RNA, 21 nt, Arabidopsis thaliana
ugccaaaggagauuugccccg

SEQ ID NO: 199 - RNA, 21 nt, Arabidopsis thaliana
ugccaaaggagauuugccucg

SEQ ID NO: 200 - RNA, 21 nt, Arabidopsis thaliana
ugccaaaggagauuugcccgg

SEQ ID NO: 201 - RNA, 21 nt, Arabidopsis thaliana
uaugagaguauuauaagucac

SEQ ID NO: 202 - RNA, 21 nt, Arabidopsis thaliana
cgaaacuggugucgaccgaca

SEQ ID NO: 203 - RNA, 22 nt, Arabidopsis thaliana
uucgaggccuauuaaaccucug

SEQ ID NO: 204 - RNA, 21 nt, Arabidopsis thaliana
uuagauucacgcacaaacucg

SEQ ID NO: 205 - RNA, 24 nt, Arabidopsis thaliana
auuaacgcuggcgguugcggcagc

SEQ ID NO: 206 - RNA, 24 nt, Arabidopsis thaliana
augaguugggucuaacccauaacu

SEQ ID NO: 207 - RNA, 24 nt, Arabidopsis thaliana
augaguugggucuaacccauaacu

SEQ ID NO: 208 - RNA, 24 nt, Arabidopsis thaliana
augaguugggucuaacccauaacu

SEQ ID NO: 209 - RNA, 21 nt, Arabidopsis thaliana
uagaaugcuauuguaauccag

SEQ ID NO: 210 - RNA, 21 nt, Arabidopsis thaliana
uuuaaaucauauacuuuuggu

SEQ ID NO: 211 - RNA, 21 nt, Arabidopsis thaliana
augcacugccucuucccuggc

SEQ ID NO: 212 - RNA, 21 nt, Arabidopsis thaliana
auaguuucucuuguucugcac

SEQ ID NO: 213 - RNA, 21 nt, Arabidopsis thaliana
ucaucuucaucaucaucguca

SEQ ID NO: 214 - RNA, 21 nt, Arabidopsis thaliana
aacagagcagaaacagaacau

SEQ ID NO: 215 - RNA, 21 nt, Arabidopsis thaliana
gguucguacguacacuguuca

SEQ ID NO: 216 - RNA, 21 nt, Arabidopsis thaliana
gaagguagugaauuuguucga

SEQ ID NO: 217 - RNA, 21 nt, Arabidopsis thaliana
uaaugugaugaugaacugacc

SEQ ID NO: 218 - RNA, 21 nt, Arabidopsis thaliana
uuaugaaugcugaggauguug

SEQ ID NO: 219 - RNA, 21 nt, Arabidopsis thaliana
uaaacuaaucacggaaaugca

SEQ ID NO: 220 - RNA, 21 nt, Arabidopsis thaliana
uuuuggaaauuuguccuuacg

SEQ ID NO: 221 - RNA, 22 nt, Arabidopsis thaliana
uuggggacgagauguuuuguug

SEQ ID NO: 222 - RNA, 22 nt, Arabidopsis thaliana
uuggggacgagauguuuuguug

SEQ ID NO: 223 - RNA, 22 nt, Arabidopsis thaliana
uuggggacgacaucuuuuguug

SEQ ID NO: 224 - RNA, 21 nt, Arabidopsis thaliana
ugagccucugugguagcccuc

SEQ ID NO: 225 - RNA, 21 nt, Arabidopsis thaliana
uuuuuccuacuccgcccauac

SEQ ID NO: 226 - RNA, 21 nt, Arabidopsis thaliana
uuugcuuccagcuuuugucuc

SEQ ID NO: 227 - RNA, 21 nt, Arabidopsis thaliana
uugguuacccauauggccauc

SEQ ID NO: 228 - RNA, 21 nt, Arabidopsis thaliana
uucgaugucuagcagugccaa

SEQ ID NO: 229 - RNA, 21 nt, Arabidopsis thaliana
ucuaagucuucuauugauguu

SEQ ID NO: 230 - RNA, 21 nt, Arabidopsis thaliana
uacgcauugaguuucguugcu

SEQ ID NO: 231 - RNA, 21 nt, Arabidopsis thaliana
uggcuugguuuauguacaccg

SEQ ID NO: 232 - RNA, 21 nt, Arabidopsis thaliana
uucugcuauguugcugcucau

SEQ ID NO: 233 - RNA, 21 nt, Arabidopsis thaliana
uuucuucgugaauaucuggca

SEQ ID NO: 234 - RNA, 21 nt, Arabidopsis thaliana
uuagaguuuucuggauacuua

SEQ ID NO: 235 - RNA, 21 nt, Arabidopsis thaliana
acaaacaccuuggauguucuu

SEQ ID NO: 236 - RNA, 21 nt, Arabidopsis thaliana
aagcuuugcucguucauguuc

SEQ ID NO: 237 - RNA, 21 nt, Bombyx mori
ugagguaguagguuguauagu

SEQ ID NO: 238 - RNA, 22 nt, Bombyx mori
uggaauguaaagaaguauggag

SEQ ID NO: 239 - RNA, 21 nt, Bombyx mori
acccuguagauccgaauuugu

SEQ ID NO: 240 - RNA, 23 nt, Bombyx mori
uaaggcacgcggugaaugccaag

SEQ ID NO: 241 - RNA, 21 nt, Bombyx mori
ucagucuuuuucucucuccua

SEQ ID NO: 242 - RNA, 21 nt, Bombyx mori
aauggcacuggaagaauucac

SEQ ID NO: 243 - RNA, 21 nt, Bombyx mori
cuuggcacugggagaauucac

SEQ ID NO: 244 - RNA, 23 nt, Bombyx mori
ucagguaccugaaguagcgcgcg

SEQ ID NO: 245 - RNA, 22 nt, Bombyx mori
agcgagguauagaguuccuacg

SEQ ID NO: 246 - RNA, 23 nt, Bombyx mori
uaaaugcacuaucugguacgaca

SEQ ID NO: 247 - RNA, 19 nt, Bombyx mori
ugacuagauccacacucau

SEQ ID NO: 248 - RNA, 27 nt, Bombyx mori
accuagccucuccuuggcuuugucugu

SEQ ID NO: 249 - RNA, 21 nt, Bombyx mori
uaaauaucagcugguaauucu

SEQ ID NO: 250 - RNA, 23 nt, Bombyx mori
auuguacuucaucaggugcucug

SEQ ID NO: 251 - RNA, 20 nt, Bombyx mori
ucacaaccuccuugagugag

SEQ ID NO: 252 - RNA, 21 nt, Bombyx mori
ggcaagaagucggcauagcug

SEQ ID NO: 253 - RNA, 22 nt, Bombyx mori
uggcagugugguuagcugguug

SEQ ID NO: 254 - RNA, 23 nt, Bombyx mori
uggaagacuagugauuuuguugu

SEQ ID NO: 255 - RNA, 19 nt, Bombyx mori
ugaaagacauggguaguga

SEQ ID NO: 256 - RNA, 23 nt, Bombyx mori
uaauacugucagguaaagauguc

SEQ ID NO: 257 - RNA, 23 nt, Bombyx mori
ucuuugguuaucuagcuguauga

SEQ ID NO: 258 - RNA, 22 nt, Bos taurus
ugagguaguagguuguauaguu

SEQ ID NO: 259 - RNA, 22 nt, Bos taurus
agagguaguagguugcauaguu

SEQ ID NO: 260 - RNA, 22 nt, Bos taurus
ugagguaguagauuguauaguu

SEQ ID NO: 261 - RNA, 22 nt, Bos taurus
ugagguaguaguuuguacaguu

SEQ ID NO: 262 - RNA, 22 nt, Bos taurus
ugagguaguaguuugugcuguu

SEQ ID NO: 263 - RNA, 21 nt, Bos taurus
uacaguacugugauaacugaa

SEQ ID NO: 264 - RNA, 23 nt, Bos taurus
agcagcauuguacagggcuauga

SEQ ID NO: 265 - RNA, 22 nt, Bos taurus
aaaagugcuuacagugcaggua

SEQ ID NO: 266 - RNA, 22 nt, Bos taurus
agcagcauuguacagggcuauc

SEQ ID NO: 267 - RNA, 23 nt, Bos taurus
uacccuguagauccgaauuugug

SEQ ID NO: 268 - RNA, 23 nt, Bos taurus
uacccuguagaaccgaauuugug

SEQ ID NO: 269 - RNA, 22 nt, Bos taurus
uggagugugacaaugguguuug

SEQ ID NO: 270 - RNA, 23 nt, Bos taurus
uuaaggcacgcggugaaugccaa

SEQ ID NO: 271 - RNA, 23 nt, Bos taurus
ucccugagacccuuuaaccugug

SEQ ID NO: 272 - RNA, 22 nt, Bos taurus
ucccugagacccuaacuuguga

SEQ ID NO: 273 - RNA, 21 nt, Bos taurus
cguaccgugaguaauaaugcg

SEQ ID NO: 274 - RNA, 22 nt, Bos taurus
ucggauccgucugagcuuggcu

SEQ ID NO: 275 - RNA, 22 nt, Bos taurus
ucacagugaaccggucucuuuu

SEQ ID NO: 276 - RNA, 22 nt, Bos taurus
uaacagucuacagccauggucg

SEQ ID NO: 277 - RNA, 23 nt, Bos taurus
agcugguguugugaaucaggccg

SEQ ID NO: 278 - RNA, 23 nt, Bos taurus
ucuacagugcacgugucuccagu

SEQ ID NO: 279 - RNA, 22 nt, Bos taurus
uaccacaggguagaaccacgga

SEQ ID NO: 280 - RNA, 20 nt, Bos taurus
cauaaaguagaaagcacuac

SEQ ID NO: 281 - RNA, 22 nt, Bos taurus
aguguuuccuacuuuauggaug

SEQ ID NO: 282 - RNA, 23 nt, Bos taurus
guccaguuuucccaggaaucccu

SEQ ID NO: 283 - RNA, 22 nt, Bos taurus
ucagugcacuacagaacuuugu

SEQ ID NO: 284 - RNA, 22 nt, Bos taurus
ucagugcaucacagaacuuugu

SEQ ID NO: 285 - RNA, 23 nt, Bos taurus
ucucccaacccuuguaccagugu

SEQ ID NO: 286 - RNA, 21 nt, Bos taurus
cuagacugaagcuccuugagg

SEQ ID NO: 287 - RNA, 21 nt, Bos taurus
ucgaggagcucacagucuagu

SEQ ID NO: 288 - RNA, 22 nt, Bos taurus
uagcagcacaucaugguuuaca

SEQ ID NO: 289 - RNA, 21 nt, Bos taurus
uagcagcacguaaauauuggc

SEQ ID NO: 290 - RNA, 20 nt, Bos taurus
acugcagugaaggcacuugu

SEQ ID NO: 291 - RNA, 24 nt, Bos taurus
caaagugcuuacagugcagguagu

SEQ ID NO: 292 - RNA, 24 nt, Bos taurus
aacauucaacgcugucggugaguu

SEQ ID NO: 293 - RNA, 25 nt, Bos taurus
aacauucauugcugucgguggguuu

SEQ ID NO: 294 - RNA, 24 nt, Bos taurus
aacauucaaccugucggugaguuu

SEQ ID NO: 295 - RNA, 22 nt, Bos taurus
caaagaauucuccuuuugggcu

SEQ ID NO: 296 - RNA, 22 nt, Bos taurus
uaaggugcaucuagugcagaua

SEQ ID NO: 297 - RNA, 22 nt, Bos taurus
uaaggugcaucuagugcaguua

SEQ ID NO: 298 - RNA, 23 nt, Bos taurus
caacggaaucccaaaagcagcug

SEQ ID NO: 299 - RNA, 23 nt, Bos taurus
cugaccuaugaauugacagccag

SEQ ID NO: 300 - RNA, 22 nt, Bos taurus
aacuggccuacaaagucccagu

SEQ ID NO: 301 - RNA, 22 nt, Bos taurus
ugggucuuugcgggcgagauga

SEQ ID NO: 302 - RNA, 22 nt, Bos taurus
cccaguguucagacuaccuguu

SEQ ID NO: 303 - RNA, 22 nt, Bos taurus
acaguagucugcacauugguua

SEQ ID NO: 304 - RNA, 23 nt, Bos taurus
cccaguguuuagacuaucuguuc

SEQ ID NO: 305 - RNA, 23 nt, Bos taurus
uaacacugucugguaacgauguu

SEQ ID NO: 306 - RNA, 21 nt, Bos taurus
uaauacugccugguaaugaug

SEQ ID NO: 307 - RNA, 23 nt, Bos taurus
uaauacugccggguaaugaugga

SEQ ID NO: 308 - RNA, 22 nt, Bos taurus
uccuucauuccaccggagucug

SEQ ID NO: 309 - RNA, 23 nt, Bos taurus
uaaagugcuuauagugcagguag

SEQ ID NO: 310 - RNA, 22 nt, Bos taurus
caaagugcucacagugcaggua

SEQ ID NO: 311 - RNA, 24 nt, Bos taurus
uagcuuaucagacugauguugacu

SEQ ID NO: 312 - RNA, 22 nt, Bos taurus
aacagcagucgaugggcugucu

SEQ ID NO: 313 - RNA, 23 nt, Bos taurus
acugugcgugugacagcggcuga

SEQ ID NO: 314 - RNA, 24 nt, Bos taurus
guacagcaggcacagacaggcagu

SEQ ID NO: 315 - RNA, 22 nt, Bos taurus
augaccuaugaauugacagaca

SEQ ID NO: 316 - RNA, 21 nt, Bos taurus
uugugcuugaucuaaccaugu

SEQ ID NO: 317 - RNA, 22 nt, Bos taurus
aguucuucaguggcaagcuuua

SEQ ID NO: 318 - RNA, 22 nt, Bos taurus
agcuacauugucugcuggguuu

SEQ ID NO: 319 - RNA, 21 nt, Bos taurus
agcuacaucuggcuacugggu

SEQ ID NO: 320 - RNA, 22 nt, Bos taurus
aucacauugccagggauuucca

SEQ ID NO: 321 - RNA, 23 nt, Bos taurus
aucacauugccagggauuaccac

SEQ ID NO: 322 - RNA, 22 nt, Bos taurus
uggcucaguucagcaggaacag

SEQ ID NO: 323 - RNA, 22 nt, Bos taurus
cauugcacuugucucggucuga

SEQ ID NO: 324 - RNA, 22 nt, Bos taurus
uucaaguaauccaggauaggcu

SEQ ID NO: 325 - RNA, 22 nt, Bos taurus
uucaaguaauucaggauagguu

SEQ ID NO: 326 - RNA, 20 nt, Bos taurus
uucacaguggcuaaguuccg

SEQ ID NO: 327 - RNA, 21 nt, Bos taurus
uucacaguggcuaaguucugc

SEQ ID NO: 328 - RNA, 23 nt, Bos taurus
cuagcaccaucugaaaucgguua

SEQ ID NO: 329 - RNA, 24 nt, Bos taurus
uagcaccauuugaaaucaguguuu

SEQ ID NO: 330 - RNA, 22 nt, Bos taurus
uagcaccauuugaaaucgguua

SEQ ID NO: 331 - RNA, 24 nt, Bos taurus
uguaaacauccucgacuggaagcu

SEQ ID NO: 332 - RNA, 22 nt, Bos taurus
uguaaacauccuacacucagcu

SEQ ID NO: 333 - RNA, 23 nt, Bos taurus
uguaaacauccuacacucucagc

SEQ ID NO: 334 - RNA, 24 nt, Bos taurus
uguaaacauccccgacuggaagcu

SEQ ID NO: 335 - RNA, 24 nt, Bos taurus
uguaaacauccuugacuggaagcu

SEQ ID NO: 336 - RNA, 21 nt, Bos taurus
aggcaagaugcuggcauagcu

SEQ ID NO: 337 - RNA, 22 nt, Bos taurus
aaaagcuggguugagagggcga

SEQ ID NO: 338 - RNA, 25 nt, Bos taurus
ucucacacagaaaucgcacccaucu

SEQ ID NO: 339 - RNA, 21 nt, Bos taurus
gcugacuccuaguccagugcu

SEQ ID NO: 340 - RNA, 22 nt, Bos taurus
aggcaguguaauuagcugauug

SEQ ID NO: 341 - RNA, 22 nt, Bos taurus
aggcaguguaguuagcugauug

SEQ ID NO: 342 - RNA, 22 nt, Bos taurus
uuaucagaaucuccagggguac

SEQ ID NO: 343 - RNA, 21 nt, Bos taurus
auugcacgguauccaucugcg

SEQ ID NO: 344 - RNA, 21 nt, Bos taurus
aauaauacaugguugaucuuu

SEQ ID NO: 345 - RNA, 20 nt, Bos taurus
aucgaccguguuauauucgc

SEQ ID NO: 346 - RNA, 21 nt, Bos taurus
uauguaaugugguccacgucu

SEQ ID NO: 347 - RNA, 22 nt, Bos taurus
ugguugaccauagaacaugcgc

SEQ ID NO: 348 - RNA, 24 nt, Bos taurus
aagcucggucugaggccccucagu

SEQ ID NO: 349 - RNA, 22 nt, Bos taurus
aucgggaaugucguguccgccc

SEQ ID NO: 350 - RNA, 22 nt, Bos taurus
augacacgaucacucccguuga

SEQ ID NO: 351 - RNA, 22 nt, Bos taurus
uuuugcgauguguuccuaauau

SEQ ID NO: 352 - RNA, 21 nt, Bos taurus
uaugugccuuuggacuacauc

SEQ ID NO: 353 - RNA, 22 nt, Bos taurus
gcaguccaugggcauauacacu

SEQ ID NO: 354 - RNA, 22 nt, Bos taurus
ucaggcucaguccccucccgau

SEQ ID NO: 355 - RNA, 21 nt, Bos taurus
aaucauacagggacauccagu

SEQ ID NO: 356 - RNA, 22 nt, Bos taurus
aaucguacagggucauccacuu

SEQ ID NO: 357 - RNA, 21 nt, Bos taurus
uuaagacuugcagugauguuu

SEQ ID NO: 358 - RNA, 22 nt, Bos taurus
caugccuugaguguaggaccgu

SEQ ID NO: 359 - RNA, 21 nt, Bos taurus
ucaguaaauguuuauuggaug

SEQ ID NO: 360 - RNA, 22 nt, Bos taurus
aucaacaaacauuuauugugug

SEQ ID NO: 361 - RNA, 24 nt, Bos taurus
uggaagacuagugauuuuguuguu

SEQ ID NO: 362 - RNA, 22 nt, Bos taurus
uauugcacuugucccggccugu

SEQ ID NO: 363 - RNA, 22 nt, Bos taurus
caaagugcuguucgugcaggua

SEQ ID NO: 364 - RNA, 22 nt, Bos taurus
ugagguaguaaguuguauuguu

SEQ ID NO: 365 - RNA, 21 nt, Bos taurus
aacccguagauccgaucuugu

SEQ ID NO: 366 - RNA, 22 nt, Caenorhabditis briggsae
ugagguaguagguuguauaguu

SEQ ID NO: 367 - RNA, 21 nt, Caenorhabditis briggsae
ucccugagaccucaaguguga

SEQ ID NO: 368 - RNA, 21 nt, Caenorhabditis briggsae
uuuuguaugagacgcauuccg

SEQ ID NO: 369 - RNA, 21 nt, Caenorhabditis briggsae
uggaauguaaagaaguaugua

SEQ ID NO: 370 - RNA, 21 nt, Caenorhabditis briggsae
uaaggcacgcggugaaugcca

SEQ ID NO: 371 - RNA, 23 nt, Caenorhabditis briggsae
aauggcacugcaugaauucacgg

SEQ ID NO: 372 - RNA, 23 nt, Caenorhabditis briggsae
guauuaguugugcgaccaggaaa

SEQ ID NO: 373 - RNA, 24 nt, Caenorhabditis briggsae
uaagcucgugaacaacaggcagga

SEQ ID NO: 374 - RNA, 23 nt, Caenorhabditis briggsae
uaaaugcaucuuaacugcgguga

SEQ ID NO: 375 - RNA, 23 nt, Caenorhabditis briggsae
uugagcaaugcgcaugugcggga

SEQ ID NO: 376 - RNA, 21 nt, Caenorhabditis briggsae
uuauugcucgagaauacccuu

SEQ ID NO: 377 - RNA, 23 nt, Caenorhabditis briggsae
uaauacugucagguaaugacgcu

SEQ ID NO: 378 - RNA, 23 nt, Caenorhabditis briggsae
uuuguacuacaauuagguacugg

SEQ ID NO: 379 - RNA, 21 nt, Caenorhabditis briggsae
uuguacugcacaaaaguacug

SEQ ID NO: 380 - RNA, 22 nt, Caenorhabditis briggsae
uacuggccuccaaauuuucgcu

SEQ ID NO: 381 - RNA, 21 nt, Caenorhabditis briggsae
ugagguaggugugagaaauga

SEQ ID NO: 382 - RNA, 24 nt, Caenorhabditis briggsae
ucuuugguuguacaaagugguaug

SEQ ID NO: 383 - RNA, 22 nt, Caenorhabditis briggsae
auugguccccuccaaguagcuc

SEQ ID NO: 384 - RNA, 22 nt, Caenorhabditis briggsae
uuacauguauuggguaggagcu

SEQ ID NO: 385 - RNA, 23 nt, Caenorhabditis briggsae
uacacgugcucggauaacgcuca

SEQ ID NO: 386 - RNA, 22 nt, Caenorhabditis briggsae
ucacaggauuuuugaguguugc

SEQ ID NO: 387 - RNA, 22 nt, Caenorhabditis briggsae
ucacagucaacuguuggcacgg

SEQ ID NO: 388 - RNA, 24 nt, Caenorhabditis briggsae
uuaaguaguggugccgcucuuauu

SEQ ID NO: 389 - RNA, 23 nt, Caenorhabditis briggsae
uaaguaguagugccgcagguaac

SEQ ID NO: 390 - RNA, 21 nt, Caenorhabditis briggsae
cacaccucacuaacacuaacu

SEQ ID NO: 391 - RNA, 23 nt, Caenorhabditis briggsae
ugcaaaucuuuugcaacuguaua

SEQ ID NO: 392 - RNA, 21 nt, Caenorhabditis briggsae
aaaucucauccuaaucugguu

SEQ ID NO: 393 - RNA, 25 nt, Caenorhabditis briggsae
ggcaagaauuagaagcaguuuuggu

SEQ ID NO: 394 - RNA, 22 nt, Caenorhabditis briggsae
aggcagugugguuagcugguug

SEQ ID NO: 395 - RNA, 22 nt, Caenorhabditis briggsae
ucaccgggugaaaacuugcaag

SEQ ID NO: 396 - RNA, 21 nt, Caenorhabditis briggsae
caaguaucauguguugguauc

SEQ ID NO: 397 - RNA, 21 nt, Caenorhabditis briggsae
accuuguuuguugcugcuccu

SEQ ID NO: 398 - RNA, 21 nt, Caenorhabditis briggsae
uuuguuuuagccugagcuaug

SEQ ID NO: 399 - RNA, 21 nt, Caenorhabditis briggsae
augagcaacgcgaacaaaucc

SEQ ID NO: 400 - RNA, 21 nt, Caenorhabditis briggsae
aaaaugccagucauugacgga

SEQ ID NO: 401 - RNA, 22 nt, Caenorhabditis briggsae
caauugguauccuuagucgugg

SEQ ID NO: 402 - RNA, 22 nt, Caenorhabditis briggsae
ucaccgggugaaaauucgcaau

SEQ ID NO: 403 - RNA, 21 nt, Caenorhabditis briggsae
ugaccguaaucccguucacaa

SEQ ID NO: 404 - RNA, 22 nt, Caenorhabditis briggsae
ucaccgggagacaaccugguau

SEQ ID NO: 405 - RNA, 22 nt, Caenorhabditis briggsae
ucaccgggugaaaaacgguuag

SEQ ID NO: 406 - RNA, 22 nt, Caenorhabditis briggsae
ucaccgggugucaaucagcuag

SEQ ID NO: 407 - RNA, 21 nt, Caenorhabditis briggsae
ucaccgggugaaaaacuccca

SEQ ID NO: 408 - RNA, 20 nt, Caenorhabditis briggsae
caccggguuaacaucuacag

SEQ ID NO: 409 - RNA, 23 nt, Caenorhabditis briggsae
uaucacaguuuacuugcugucgc

SEQ ID NO: 410 - RNA, 21 nt, Caenorhabditis briggsae
ugacuagagacacauucagcu

SEQ ID NO: 411 - RNA, 21 nt, Caenorhabditis briggsae
ugacuagagacacauucagcu

SEQ ID NO: 412 - RNA, 22 nt, Caenorhabditis briggsae
ugucauggagucgcucucuuca

SEQ ID NO: 413 - RNA, 22 nt, Caenorhabditis briggsae
ugucauggaggcgcucucuuca

SEQ ID NO: 414 - RNA, 23 nt, Caenorhabditis briggsae
ugagguaggcucaguagaugcga

SEQ ID NO: 415 - RNA, 22 nt, Caenorhabditis briggsae
aagcaccacgagaagcugcaga

SEQ ID NO: 416 - RNA, 24 nt, Caenorhabditis briggsae
ugauaugucugauauucuuggguu

SEQ ID NO: 417 - RNA, 23 nt, Caenorhabditis briggsae
uacccguagcuccuugccauguu

SEQ ID NO: 418 - RNA, 24 nt, Caenorhabditis briggsae
cacccguacauauguuuccgugcu

SEQ ID NO: 419 - RNA, 23 nt, Caenorhabditis briggsae
uacccguauauuuuucugccgag

SEQ ID NO: 420 - RNA, 24 nt, Caenorhabditis briggsae
uacccuguagaucgagcugugugu

SEQ ID NO: 421 - RNA, 22 nt, Caenorhabditis briggsae
ugagaucguucaguacggcaau

SEQ ID NO: 422 - RNA, 23 nt, Caenorhabditis briggsae
uauuaugcacauuuucuagucca

SEQ ID NO: 423 - RNA, 23 nt, Caenorhabditis briggsae
ugacuagaaccuugacucugcuc

SEQ ID NO: 424 - RNA, 22 nt, Caenorhabditis briggsae
ugauauguaaucuagcuuacag

SEQ ID NO: 425 - RNA, 23 nt, Caenorhabditis briggsae
caugacacugaagcguguacgga

SEQ ID NO: 426 - RNA, 24 nt, Caenorhabditis briggsae
ucacaaccuccuagaaagaguaga

SEQ ID NO: 427 - RNA, 23 nt, Caenorhabditis briggsae
uaauacgugauugguguucccag

SEQ ID NO: 428 - RNA, 19 nt, Caenorhabditis briggsae
ugaaagacauggguaguga

SEQ ID NO: 429 - RNA, 19 nt, Caenorhabditis briggsae
aggcagauguuggcauagc

SEQ ID NO: 430 - RNA, 23 nt, Caenorhabditis briggsae
uggcaagauguuggcaguucagu

SEQ ID NO: 431 - RNA, 22 nt, Caenorhabditis briggsae
uggcaagaaauggcagucuaga

SEQ ID NO: 432 - RNA, 22 nt, Caenorhabditis briggsae
uuaaagcuaccaaccgccuuca

SEQ ID NO: 433 - RNA, 22 nt, Caenorhabditis briggsae
uucaucaggccauagcugucca

SEQ ID NO: 434 - RNA, 22 nt, Caenorhabditis briggsae
auaaagcuagguuaccaaagcu

SEQ ID NO: 435 - RNA, 23 nt, Caenorhabditis briggsae
ugagaucauuaguugaaagccga

SEQ ID NO: 436 - RNA, 22 nt, Caenorhabditis briggsae
ugagaucaucgugaaagcuagu

SEQ ID NO: 437 - RNA, 22 nt, Caenorhabditis briggsae
ugagaucaucgugaaagccagu

SEQ ID NO: 438 - RNA, 22 nt, Caenorhabditis briggsae
uagcaccauauaaauucagugu

SEQ ID NO: 439 - RNA, 22 nt, Caenorhabditis briggsae
ugagguaguuugcaaugcuguc

SEQ ID NO: 440 - RNA, 24 nt, Caenorhabditis briggsae
uacaaaguauuugaaaaggcgugc

SEQ ID NO: 441 - RNA, 23 nt, Caenorhabditis briggsae
uaagugaaugcuuugccacaguc

SEQ ID NO: 442 - RNA, 20 nt, Caenorhabditis briggsae
gugagcaaaguuucaggugu

SEQ ID NO: 443 - RNA, 22 nt, Caenorhabditis briggsae
ugauauguuguuugaaugcccc

SEQ ID NO: 444 - RNA, 22 nt, Caenorhabditis elegans
ugagguaguagguuguauaguu

SEQ ID NO: 445 - RNA, 21 nt, Caenorhabditis elegans
ucccugagaccucaaguguga

SEQ ID NO: 446 - RNA, 21 nt, Caenorhabditis elegans
uuuuguaugagacgcauuucg

SEQ ID NO: 447 - RNA, 21 nt, Caenorhabditis elegans
uggaauguaaagaaguaugua

SEQ ID NO: 448 - RNA, 21 nt, Caenorhabditis elegans
uaaggcacgcggugaaugcca

SEQ ID NO: 449 - RNA, 23 nt, Caenorhabditis elegans
uaucacagccagcuuugaugugc

SEQ ID NO: 450 - RNA, 22 nt, Caenorhabditis elegans
agcuuucgacaugauucugaac

SEQ ID NO: 451 - RNA, 23 nt, Caenorhabditis elegans
aauggcacugcaugaauucacgg

SEQ ID NO: 452 - RNA, 27 nt, Caenorhabditis elegans
aaugacacugguuaucuuuuccaucgu

SEQ ID NO: 453 - RNA, 23 nt, Caenorhabditis elegans
guauuaguugugcgaccaggaga

SEQ ID NO: 454 - RNA, 24 nt, Caenorhabditis elegans
uaagcucgugaucaacaggcagaa

SEQ ID NO: 455 - RNA, 23 nt, Caenorhabditis elegans
uaaaugcaucuuaacugcgguga

SEQ ID NO: 456 - RNA, 23 nt, Caenorhabditis elegans
uugagcaaugcgcaugugcggga

SEQ ID NO: 457 - RNA, 21 nt, Caenorhabditis elegans
uuauugcucgagaauacccuu

SEQ ID NO: 458 - RNA, 22 nt, Caenorhabditis elegans
uauugcacucuccccggccuga

SEQ ID NO: 459 - RNA, 23 nt, Caenorhabditis elegans
uaauacugucagguaaugacgcu

SEQ ID NO: 460 - RNA, 24 nt, Caenorhabditis elegans
ucccugagaauucucgaacagcuu

SEQ ID NO: 461 - RNA, 23 nt, Caenorhabditis elegans
uuuguacuccgaugccauucaga

SEQ ID NO: 462 - RNA, 23 nt, Caenorhabditis elegans
uuuguacuacacauagguacugg

SEQ ID NO: 463 - RNA, 21 nt, Caenorhabditis elegans
uuguacuacacaaaaguacug

SEQ ID NO: 464 - RNA, 22 nt, Caenorhabditis elegans
uacuggcccccaaaucuucgcu

SEQ ID NO: 465 - RNA, 21 nt, Caenorhabditis elegans
ugagguaggugcgagaaauga

SEQ ID NO: 466 - RNA, 21 nt, Caenorhabditis elegans
uugcguaggccuuugcuucga

SEQ ID NO: 467 - RNA, 23 nt, Caenorhabditis elegans
cgguacgaucgcggcgggauauc

SEQ ID NO: 468 - RNA, 24 nt, Caenorhabditis elegans
ucuuugguuguacaaagugguaug

SEQ ID NO: 469 - RNA, 22 nt, Caenorhabditis elegans
auugguccccuccaaguagcuc

SEQ ID NO: 470 - RNA, 22 nt, Caenorhabditis elegans
uuacauguuucggguaggagcu

SEQ ID NO: 471 - RNA, 23 nt, Caenorhabditis elegans
ugacuagagccuauucucuucuu

SEQ ID NO: 472 - RNA, 23 nt, Caenorhabditis elegans
uacacgugcacggauaacgcuca

SEQ ID NO: 473 - RNA, 22 nt, Caenorhabditis elegans
ucacaggacuuuugagcguugc

SEQ ID NO: 474 - RNA, 22 nt, Caenorhabditis elegans
ucacagucaacuguuggcaugg

SEQ ID NO: 475 - RNA, 24 nt, Caenorhabditis elegans
uuaaguaguggugccgcucuuauu

SEQ ID NO: 476 - RNA, 23 nt, Caenorhabditis elegans
uaaguaguagugccgcagguaac

SEQ ID NO: 477 - RNA, 21 nt, Caenorhabditis elegans
cacaccucacuaacacugacc

SEQ ID NO: 478 - RNA, 23 nt, Caenorhabditis elegans
ugcaaaucuuucgcgacuguagg

SEQ ID NO: 479 - RNA, 21 nt, Caenorhabditis elegans
uggaaugcauagaagacugua

SEQ ID NO: 480 - RNA, 22 nt, Caenorhabditis elegans
gaguaucaggaguacccaguga

SEQ ID NO: 481 - RNA, 21 nt, Caenorhabditis elegans
gguuuugagaggaauccuuuu

SEQ ID NO: 482 - RNA, 21 nt, Caenorhabditis elegans
aaaucucauccuaaucuggua

SEQ ID NO: 483 - RNA, 20 nt, Caenorhabditis elegans
gugaugucgaacucuuguag

SEQ ID NO: 484 - RNA, 19 nt, Caenorhabditis elegans
uagcuuuuuaguuuucacg

SEQ ID NO: 485 - RNA, 20 nt, Caenorhabditis elegans
guuucucgauguuuucugau

SEQ ID NO: 486 - RNA, 20 nt, Caenorhabditis elegans
ggcgggugguuguuguuaug

SEQ ID NO: 487 - RNA, 20 nt, Caenorhabditis elegans
ugagggaggaagggugguau

SEQ ID NO: 488 - RNA, 20 nt, Caenorhabditis elegans
aggcaagacuuuggcaaagc

SEQ ID NO: 489 - RNA, 20 nt, Caenorhabditis elegans
cccgugaagugucugcugca

SEQ ID NO: 490 - RNA, 24 nt, Caenorhabditis elegans
ggcaagaauuagaagcaguuuggu

SEQ ID NO: 491 - RNA, 20 nt, Caenorhabditis elegans
ggcaagacucuggcaaaacu

SEQ ID NO: 492 - RNA, 20 nt, Caenorhabditis elegans
ggcaugauguagcaguggag

SEQ ID NO: 493 - RNA, 20 nt, Caenorhabditis elegans
ucgccgggugggaaagcauu

SEQ ID NO: 494 - RNA, 18 nt, Caenorhabditis elegans
uguaggcauggguguuug

SEQ ID NO: 495 - RNA, 20 nt, Caenorhabditis elegans
ugcccguacugugucggcug

SEQ ID NO: 496 - RNA, 22 nt, Caenorhabditis elegans
aggcagugugguuagcugguug

SEQ ID NO: 497 - RNA, 22 nt, Caenorhabditis elegans
ucaccggguggaaacuagcagu

SEQ ID NO: 498 - RNA, 21 nt, Caenorhabditis elegans
caauugccauguguugguauu

SEQ ID NO: 499 - RNA, 21 nt, Caenorhabditis elegans
accuuguuuguugcugcuccu

SEQ ID NO: 500 - RNA, 21 nt, Caenorhabditis elegans
uuuguuuuagccugagcuaug

SEQ ID NO: 501 - RNA, 21 nt, Caenorhabditis elegans
uugagcaacgcgaacaaauca

SEQ ID NO: 502 - RNA, 21 nt, Caenorhabditis elegans
uaaaugccagucguugcagga

SEQ ID NO: 503 - RNA, 21 nt, Caenorhabditis elegans
caauugguaucccugucaagg

SEQ ID NO: 504 - RNA, 21 nt, Caenorhabditis elegans
ucacuggucuuucucugacga

SEQ ID NO: 505 - RNA, 22 nt, Caenorhabditis elegans
ucaccgggugaaaauucgcaug

SEQ ID NO: 506 - RNA, 21 nt, Caenorhabditis elegans
ugaccguaaucccguucacaa

SEQ ID NO: 507 - RNA, 22 nt, Caenorhabditis elegans
ucaccgggugaacacuugcagu

SEQ ID NO: 508 - RNA, 22 nt, Caenorhabditis elegans
ucaccgggagaaaaacuggagu

SEQ ID NO: 509 - RNA, 22 nt, Caenorhabditis elegans
ucaccggguguaaaucagcuug

SEQ ID NO: 510 - RNA, 22 nt, Caenorhabditis elegans
uaucaucgaucacgugugauga

SEQ ID NO: 511 - RNA, 22 nt, Caenorhabditis elegans
ucaccggguguacaucagcuaa

SEQ ID NO: 512 - RNA, 22 nt, Caenorhabditis elegans
ucaccgggugaaaaaucaccua

SEQ ID NO: 513 - RNA, 20 nt, Caenorhabditis elegans
caccggguuaacaucuacag

SEQ ID NO: 514 - RNA, 23 nt, Caenorhabditis elegans
uaucacaguuuacuugcugucgc

SEQ ID NO: 515 - RNA, 21 nt, Caenorhabditis elegans
ugacuagagacacauucagcu

SEQ ID NO: 516 - RNA, 21 nt, Caenorhabditis elegans
ugacuagagacacauucagcu

SEQ ID NO: 517 - RNA, 22 nt, Caenorhabditis elegans
ugucauggagucgcucucuuca

SEQ ID NO: 518 - RNA, 22 nt, Caenorhabditis elegans
ugucauggaggcgcucucuuca

SEQ ID NO: 519 - RNA, 23 nt, Caenorhabditis elegans
ugagguaggcucaguagaugcga

SEQ ID NO: 520 - RNA, 22 nt, Caenorhabditis elegans
aagcaccacgagaagcugcaga

SEQ ID NO: 521 - RNA, 24 nt, Caenorhabditis elegans
ugauaugucugguauucuuggguu

SEQ ID NO: 522 - RNA, 23 nt, Caenorhabditis elegans
uacccguagcuccuauccauguu

SEQ ID NO: 523 - RNA, 24 nt, Caenorhabditis elegans
cacccguacauauguuuccgugcu

SEQ ID NO: 524 - RNA, 24 nt, Caenorhabditis elegans
cacccguacauuuguuuccgugcu

SEQ ID NO: 525 - RNA, 24 nt, Caenorhabditis elegans
uacccguaaucuucauaauccgag

SEQ ID NO: 526 - RNA, 23 nt, Caenorhabditis elegans
uacccguauaaguuucugcugag

SEQ ID NO: 527 - RNA, 22 nt, Caenorhabditis elegans
uacccguaauguuuccgcugag

SEQ ID NO: 528 - RNA, 23 nt, Caenorhabditis elegans
uggcggauccauuuuggguugua

SEQ ID NO: 529 - RNA, 24 nt, Caenorhabditis elegans
uacccuguagaucgagcugugugu

SEQ ID NO: 530 - RNA, 22 nt, Caenorhabditis elegans
ugagaucguucaguacggcaau

SEQ ID NO: 531 - RNA, 23 nt, Caenorhabditis elegans
ucgaaucguuuaucaggaugaug

SEQ ID NO: 532 - RNA, 23 nt, Caenorhabditis elegans
uauuaugcacauuuucuaguuca

SEQ ID NO: 533 - RNA, 23 nt, Caenorhabditis elegans
ugacuagaaccguuacucaucuc

SEQ ID NO: 534 - RNA, 22 nt, Caenorhabditis elegans
ugauauguaaucuagcuuacag

SEQ ID NO: 535 - RNA, 24 nt, Caenorhabditis elegans
uaugacacugaagcgaguuggaaa

SEQ ID NO: 536 - RNA, 23 nt, Caenorhabditis elegans
uaugacacugaagcguuaccgaa

SEQ ID NO: 537 - RNA, 23 nt, Caenorhabditis elegans
uaugacacugaagcguaaccgaa

SEQ ID NO: 538 - RNA, 23 nt, Caenorhabditis elegans
caugacacugauuagggauguga

SEQ ID NO: 539 - RNA, 24 nt, Caenorhabditis elegans
ucacaaccuccuagaaagaguaga

SEQ ID NO: 540 - RNA, 23 nt, Caenorhabditis elegans
uaauacgucguugguguuuccau

SEQ ID NO: 541 - RNA, 19 nt, Caenorhabditis elegans
ugaaagacauggguaguga

SEQ ID NO: 542 - RNA, 20 nt, Caenorhabditis elegans
aggcaagauguuggcauagc

SEQ ID NO: 543 - RNA, 23 nt, Caenorhabditis elegans
uggcaagauguaggcaguucagu

SEQ ID NO: 544 - RNA, 22 nt, Caenorhabditis elegans
uggcaagaaauggcagucuaca

SEQ ID NO: 545 - RNA, 22 nt, Caenorhabditis elegans
uuaaagcuaccaaccggcuuca

SEQ ID NO: 546 - RNA, 22 nt, Caenorhabditis elegans
uucguuguugaugaagccuuga

SEQ ID NO: 547 - RNA, 22 nt, Caenorhabditis elegans
uucaucaggccauagcugucca

SEQ ID NO: 548 - RNA, 21 nt, Caenorhabditis elegans
uggaggccugguuguuugugc

SEQ ID NO: 549 - RNA, 22 nt, Caenorhabditis elegans
auaaagcuagguuaccaaagcu

SEQ ID NO: 550 - RNA, 23 nt, Caenorhabditis elegans
ugagaucauuaguugaaagccga

SEQ ID NO: 551 - RNA, 22 nt, Caenorhabditis elegans
ugagaucaucgugaaagcuagu

SEQ ID NO: 552 - RNA, 22 nt, Caenorhabditis elegans
ugagaucaucgugaaagccagu

SEQ ID NO: 553 - RNA, 22 nt, Caenorhabditis elegans
uagcaccauauaaauucaguaa

SEQ ID NO: 554 - RNA, 22 nt, Caenorhabditis elegans
ugagguaguauguaauauugua

SEQ ID NO: 555 - RNA, 24 nt, Caenorhabditis elegans
uacaaaguauuugaaaagucgugc

SEQ ID NO: 556 - RNA, 23 nt, Caenorhabditis elegans
uaagugaaugcuuugccacaguc

SEQ ID NO: 557 - RNA, 20 nt, Caenorhabditis elegans
gugagcaaaguuucaggugu

SEQ ID NO: 558 - RNA, 22 nt, Caenorhabditis elegans
ugauauguuguuugaaugcccc

SEQ ID NO: 559 - RNA, 22 nt, Canis familiaris
uaaugccccuaaaaauccuuau

SEQ ID NO: 560 - RNA, 22 nt, Canis familiaris
uaauacugucugguaaugccgu

SEQ ID NO: 561 - RNA, 22 nt, Canis familiaris
uugcauauguaggaugucccau

SEQ ID NO: 562 - RNA, 22 nt, Canis familiaris
uggcaguguauuguuagcuggu

SEQ ID NO: 563 - RNA, 22 nt, Canis familiaris
uuuuugcgauguguuccuaaua

SEQ ID NO: 564 - RNA, 23 nt, Drosophila melanogaster
ugagaucauuuugaaagcugauu

SEQ ID NO: 565 - RNA, 21 nt, Drosophila melanogaster
ugagguaguagguuguauagu

SEQ ID NO: 566 - RNA, 22 nt, Drosophila melanogaster
uggaauguaaagaaguauggag

SEQ ID NO: 567 - RNA, 21 nt, Drosophila melanogaster
acccuguagauccgaauuugu

SEQ ID NO: 568 - RNA, 22 nt, Drosophila melanogaster
aacccguaaauccgaacuugug

SEQ ID NO: 569 - RNA, 21 nt, Drosophila melanogaster
caucacagucugaguucuugc

SEQ ID NO: 570 - RNA, 23 nt, Drosophila melanogaster
ugaguauuacaucagguacuggu

SEQ ID NO: 571 - RNA, 23 nt, Drosophila melanogaster
uaaggcacgcggugaaugccaag

SEQ ID NO: 572 - RNA, 22 nt, Drosophila melanogaster
ucccugagacccuaacuuguga

SEQ ID NO: 573 - RNA, 22 nt, Drosophila melanogaster
uugguccccuucaaccagcugu

SEQ ID NO: 574 - RNA, 22 nt, Drosophila melanogaster
uaucacagccauuuugaugagu

SEQ ID NO: 575 - RNA, 22 nt, Drosophila melanogaster
uaucacagccauuuugacgagu

SEQ ID NO: 576 - RNA, 21 nt, Drosophila melanogaster
ucagucuuuuucucucuccua

SEQ ID NO: 577 - RNA, 22 nt, Drosophila melanogaster
uggacggagaacugauaagggc

SEQ ID NO: 578 - RNA, 21 nt, Drosophila melanogaster
ccuuaucauucucucgccccg

SEQ ID NO: 579 - RNA, 21 nt, Drosophila melanogaster
uugugcgugugacagcggcua

SEQ ID NO: 580 - RNA, 23 nt, Drosophila melanogaster
ugauuguccaaacgcaauucuug

SEQ ID NO: 581 - RNA, 24 nt, Drosophila melanogaster
guuaauggcacuggaagaauucac

SEQ ID NO: 582 - RNA, 21 nt, Drosophila melanogaster
cuuggcacugggagaauucac

SEQ ID NO: 583 - RNA, 26 nt, Drosophila melanogaster
uuuugugaccgacacuaacggguaau

SEQ ID NO: 584 - RNA, 23 nt, Drosophila melanogaster
ucagguaccugaaguagcgcgcg

SEQ ID NO: 585 - RNA, 23 nt, Drosophila melanogaster
cagcgagguauagaguuccuacg

SEQ ID NO: 586 - RNA, 22 nt, Drosophila melanogaster
uaggaacuucauaccgugcucu

SEQ ID NO: 587 - RNA, 22 nt, Drosophila melanogaster
uaggaacuuaauaccgugcucu

SEQ ID NO: 588 - RNA, 23 nt, Drosophila melanogaster
uaaaugcacuaucugguacgaca

SEQ ID NO: 589 - RNA, 22 nt, Drosophila melanogaster
ucggugggacuuucguccguuu

SEQ ID NO: 590 - RNA, 22 nt, Drosophila melanogaster
ugacuagauccacacucauuaa

SEQ ID NO: 591 - RNA, 27 nt, Drosophila melanogaster
uguauuuacguugcauaugaaaugaua

SEQ ID NO: 592 - RNA, 23 nt, Drosophila melanogaster
ugucauggaauugcucucuuugu

SEQ ID NO: 593 - RNA, 22 nt, Drosophila melanogaster
aagagagcuguccgucgacagu

SEQ ID NO: 594 - RNA, 22 nt, Drosophila melanogaster
aagagagcuauccgucgacagu

SEQ ID NO: 595 - RNA, 28 nt, Drosophila melanogaster
aaucuagccucuacuaggcuuugucugu

SEQ ID NO: 596 - RNA, 21 nt, Drosophila melanogaster
uaaauaucagcugguaauucu

SEQ ID NO: 597 - RNA, 29 nt, Drosophila melanogaster
ugaagucagcaacuugauuccagcaauug

SEQ ID NO: 598 - RNA, 22 nt, Drosophila melanogaster
uagcaccauucgaaaucagugc

SEQ ID NO: 599 - RNA, 23 nt, Drosophila melanogaster
ugacuagaccgaacacucgugcu

SEQ ID NO: 600 - RNA, 21 nt, Drosophila melanogaster
uguguugaaaaucguuugcac

SEQ ID NO: 601 - RNA, 23 nt, Drosophila melanogaster
uuucaugucgauuucauuucaug

SEQ ID NO: 602 - RNA, 26 nt, Drosophila melanogaster
uaaauauuuaaguggagccugcgacu

SEQ ID NO: 603 - RNA, 23 nt, Drosophila melanogaster
uaucacagccagcuuugaugagc

SEQ ID NO: 604 - RNA, 23 nt, Drosophila melanogaster
uaucacagccagcuuugaggagc

SEQ ID NO: 605 - RNA, 23 nt, Drosophila melanogaster
uaucacagccagcuuugaugggc

SEQ ID NO: 606 - RNA, 22 nt, Drosophila melanogaster
ucacugggcaaagugugucuca

SEQ ID NO: 607 - RNA, 23 nt, Drosophila melanogaster
uuuagguuucacaggaaacuggu

SEQ ID NO: 608 - RNA, 23 nt, Drosophila melanogaster
uaaucucaauuuguaaaugugag

SEQ ID NO: 609 - RNA, 23 nt, Drosophila melanogaster
auuguacuucaucaggugcucug

SEQ ID NO: 610 - RNA, 22 nt, Drosophila melanogaster
ucagguacuuagugacucucaa

SEQ ID NO: 611 - RNA, 22 nt, Drosophila melanogaster
gggggucacucugugccugugc

SEQ ID NO: 612 - RNA, 20 nt, Drosophila melanogaster
ucacaaccuccuugagugag

SEQ ID NO: 613 - RNA, 22 nt, Drosophila melanogaster
aaucacaggauuauacugugag

SEQ ID NO: 614 - RNA, 22 nt, Drosophila melanogaster
gcacuggguaaaguuuguccua

SEQ ID NO: 615 - RNA, 22 nt, Drosophila melanogaster
uauugcacacuucccggccuuu

SEQ ID NO: 616 - RNA, 22 nt, Drosophila melanogaster
uauugcacauucaccggccuga

SEQ ID NO: 617 - RNA, 22 nt, Drosophila melanogaster
uauugcacuugagacggccuga

SEQ ID NO: 618 - RNA, 22 nt, Drosophila melanogaster
uauugcacuuuucacagcccga

SEQ ID NO: 619 - RNA, 21 nt, Drosophila melanogaster
uauucgagccaauaaguucgg

SEQ ID NO: 620 - RNA, 22 nt, Drosophila melanogaster
uuuugauuguugcucagaaagc

SEQ ID NO: 621 - RNA, 22 nt, Drosophila melanogaster
ugucuuuuuccgcuuacuggcg

SEQ ID NO: 622 - RNA, 24 nt, Drosophila melanogaster
ugaacacagcuggugguauccagu

SEQ ID NO: 623 - RNA, 22 nt, Drosophila melanogaster
ucacugggcuuuguuuaucuca

SEQ ID NO: 624 - RNA, 23 nt, Drosophila melanogaster
uggcaagaugucggcauagcuga

SEQ ID NO: 625 - RNA, 22 nt, Drosophila melanogaster
uggcaagaugucggaauagcug

SEQ ID NO: 626 - RNA, 21 nt, Drosophila melanogaster
aggugcauuguagucgcauug

SEQ ID NO: 627 - RNA, 22 nt, Drosophila melanogaster
uggcagugugguuagcugguug

SEQ ID NO: 628 - RNA, 21 nt, Drosophila melanogaster
auaaagcuagacaaccauuga

SEQ ID NO: 629 - RNA, 23 nt, Drosophila melanogaster
aaaggaacgaucguugugauaug

SEQ ID NO: 630 - RNA, 22 nt, Drosophila melanogaster
uaucacaguggcuguucuuuuu

SEQ ID NO: 631 - RNA, 23 nt, Drosophila melanogaster
uggaagacuagugauuuuguugu

SEQ ID NO: 632 - RNA, 22 nt, Drosophila melanogaster
uaaagcuagauuaccaaagcau

SEQ ID NO: 633 - RNA, 23 nt, Drosophila melanogaster
uaauacugucagguaaagauguc

SEQ ID NO: 634 - RNA, 21 nt, Drosophila melanogaster
uugagcaaaauuucaggugug

SEQ ID NO: 635 - RNA, 22 nt, Drosophila melanogaster
cauugcacuugucccggccuau

SEQ ID NO: 636 - RNA, 22 nt, Drosophila melanogaster
aauugcacuagucccggccugc

SEQ ID NO: 637 - RNA, 23 nt, Drosophila melanogaster
ucuuugguuaucuagcuguauga

SEQ ID NO: 638 - RNA, 23 nt, Drosophila melanogaster
ucuuuggugauuuuagcuguaug

SEQ ID NO: 639 - RNA, 22 nt, Drosophila melanogaster
ucuuugguauucuagcuguaga

SEQ ID NO: 640 - RNA, 24 nt, Drosophila melanogaster
cgguauaccuucaguauacguaac

SEQ ID NO: 641 - RNA, 22 nt, Drosophila melanogaster
acguauacugaauguauccuga

SEQ ID NO: 642 - RNA, 23 nt, Drosophila pseudoobscura
ugagaucauuuugaaagcugauu

SEQ ID NO: 643 - RNA, 21 nt, Drosophila pseudoobscura
ugagguaguagguuguauagu

SEQ ID NO: 644 - RNA, 22 nt, Drosophila pseudoobscura
uggaauguaaagaaguauggag

SEQ ID NO: 645 - RNA, 21 nt, Drosophila pseudoobscura
acccuguagauccgaauuugu

SEQ ID NO: 646 - RNA, 22 nt, Drosophila pseudoobscura
aacccguaauuccgaacuugug

SEQ ID NO: 647 - RNA, 21 nt, Drosophila pseudoobscura
caucacagucugaguucuugc

SEQ ID NO: 648 - RNA, 23 nt, Drosophila pseudoobscura
ugaguauuacaucagguacuggu

SEQ ID NO: 649 - RNA, 23 nt, Drosophila pseudoobscura
uaaggcacgcggugaaugccaag

SEQ ID NO: 650 - RNA, 22 nt, Drosophila pseudoobscura
ucccugagacccuaacuuguga

SEQ ID NO: 651 - RNA, 22 nt, Drosophila pseudoobscura
uugguccccuucaaccagcugu

SEQ ID NO: 652 - RNA, 22 nt, Drosophila pseudoobscura
uaucacagccauuuugaugagu

SEQ ID NO: 653 - RNA, 22 nt, Drosophila pseudoobscura
uaucacagccauuuugacgagu

SEQ ID NO: 654 - RNA, 21 nt, Drosophila pseudoobscura
ucagucuuuuucucucuccua

SEQ ID NO: 655 - RNA, 22 nt, Drosophila pseudoobscura
uggacggagaacugauaagggc

SEQ ID NO: 656 - RNA, 21 nt, Drosophila pseudoobscura
uugugcgugugacagcggcua

SEQ ID NO: 657 - RNA, 23 nt, Drosophila pseudoobscura
ugauuguccaaacgcaauucuug

SEQ ID NO: 658 - RNA, 24 nt, Drosophila pseudoobscura
guuaauggcacuggaagaauucac

SEQ ID NO: 659 - RNA, 21 nt, Drosophila pseudoobscura
cuuggcacugggagaauucac

SEQ ID NO: 660 - RNA, 26 nt, Drosophila pseudoobscura
uuuugugaccgacacuaacggguaau

SEQ ID NO: 661 - RNA, 23 nt, Drosophila pseudoobscura
ucagguaccugaaguagcgcgcg

SEQ ID NO: 662 - RNA, 22 nt, Drosophila pseudoobscura
uaggaacuucauaccgugcucu

SEQ ID NO: 663 - RNA, 22 nt, Drosophila pseudoobscura
uaggaacuuaauaccgugcucu

SEQ ID NO: 664 - RNA, 23 nt, Drosophila pseudoobscura
uaaaugcacuaucugguacgaca

SEQ ID NO: 665 - RNA, 22 nt, Drosophila pseudoobscura
ucggugggacuuucguccguuu

SEQ ID NO: 666 - RNA, 22 nt, Drosophila pseudoobscura
ugacuagauccacacucauuaa

SEQ ID NO: 667 - RNA, 27 nt, Drosophila pseudoobscura
uguauuuacguugcauaugaaaugaua

SEQ ID NO: 668 - RNA, 23 nt, Drosophila pseudoobscura
ugucauggaauugcucucuuugu

SEQ ID NO: 669 - RNA, 28 nt, Drosophila pseudoobscura
aaucuagccucuacuaggcuuugucugu

SEQ ID NO: 670 - RNA, 21 nt, Drosophila pseudoobscura
uaaauaucagcugguaauucu

SEQ ID NO: 671 - RNA, 29 nt, Drosophila pseudoobscura
ugaagucagcaacuugauuccagcaauug

SEQ ID NO: 672 - RNA, 22 nt, Drosophila pseudoobscura
uagcaccauucgaaaucagugc

SEQ ID NO: 673 - RNA, 23 nt, Drosophila pseudoobscura
ugacuagaccgaacacucgugcu

SEQ ID NO: 674 - RNA, 21 nt, Drosophila pseudoobscura
uguguugaaaaucguuugcac

SEQ ID NO: 675 - RNA, 23 nt, Drosophila pseudoobscura
uuucaugucgauuucauuucaug

SEQ ID NO: 676 - RNA, 26 nt, Drosophila pseudoobscura
uaaauauuuaaguggagccugcgacu

SEQ ID NO: 677 - RNA, 23 nt, Drosophila pseudoobscura
uaucacagccagcuuugaugagc

SEQ ID NO: 678 - RNA, 23 nt, Drosophila pseudoobscura
uaucacagccagcuuugaggagc

SEQ ID NO: 679 - RNA, 23 nt, Drosophila pseudoobscura
uaucacagccagcuuugaugggc

SEQ ID NO: 680 - RNA, 22 nt, Drosophila pseudoobscura
ucacugggcaaagugugucuca

SEQ ID NO: 681 - RNA, 23 nt, Drosophila pseudoobscura
uaaucucaauuuguaaaugugag

SEQ ID NO: 682 - RNA, 23 nt, Drosophila pseudoobscura
auuguacuucaucaggugcucug

SEQ ID NO: 683 - RNA, 22 nt, Drosophila pseudoobscura
ucagguacuuagugacucucaa

SEQ ID NO: 684 - RNA, 20 nt, Drosophila pseudoobscura
ucacaaccuccuugagugag

SEQ ID NO: 685 - RNA, 22 nt, Drosophila pseudoobscura
aaucacaggauuauacugugag

SEQ ID NO: 686 - RNA, 22 nt, Drosophila pseudoobscura
gcacugggugaaguuugucuua

SEQ ID NO: 687 - RNA, 21 nt, Drosophila pseudoobscura
uauucgagccaauaaguucgg

SEQ ID NO: 688 - RNA, 22 nt, Drosophila pseudoobscura
uuuugauuguugcucagaaagc

SEQ ID NO: 689 - RNA, 22 nt, Drosophila pseudoobscura
ugucuuuuuccgcuuacuggcg

SEQ ID NO: 690 - RNA, 24 nt, Drosophila pseudoobscura
ugaacacagcuggugguauccaau

SEQ ID NO: 691 - RNA, 22 nt, Drosophila pseudoobscura
ucacugggcuuuguuuaucuca

SEQ ID NO: 692 - RNA, 23 nt, Drosophila pseudoobscura
uggcaagaugucggcauagcuga

SEQ ID NO: 693 - RNA, 23 nt, Drosophila pseudoobscura
uggcaagaugucggaauagcuga

SEQ ID NO: 694 - RNA, 21 nt, Drosophila pseudoobscura
aggugcauuguagucgcauug

SEQ ID NO: 695 - RNA, 22 nt, Drosophila pseudoobscura
uggcagugugguuagcugguug

SEQ ID NO: 696 - RNA, 21 nt, Drosophila pseudoobscura
auaaagcuagacaaccauuga

SEQ ID NO: 697 - RNA, 23 nt, Drosophila pseudoobscura
aaaggaacgaucguugugauaug

SEQ ID NO: 698 - RNA, 22 nt, Drosophila pseudoobscura
uaucacaguggcuguucuuuuu

SEQ ID NO: 699 - RNA, 23 nt, Drosophila pseudoobscura
uggaagacuagugauuuuguugu

SEQ ID NO: 700 - RNA, 22 nt, Drosophila pseudoobscura
uaaagcuagauuaccaaagcau

SEQ ID NO: 701 - RNA, 23 nt, Drosophila pseudoobscura
uaauacugucagguaaagauguc

SEQ ID NO: 702 - RNA, 21 nt, Drosophila pseudoobscura
uugagcaaaauuucaggugug

SEQ ID NO: 703 - RNA, 22 nt, Drosophila pseudoobscura
cauugcacuugucccggccuau

SEQ ID NO: 704 - RNA, 22 nt, Drosophila pseudoobscura
aauugcacuagucccggccugc

SEQ ID NO: 705 - RNA, 23 nt, Drosophila pseudoobscura
ucuuugguuaucuagcuguauga

SEQ ID NO: 706 - RNA, 23 nt, Drosophila pseudoobscura
ucuuuggugauuuuagcuguaug

SEQ ID NO: 707 - RNA, 22 nt, Drosophila pseudoobscura
ucuuugguauucuagcuguaga

SEQ ID NO: 708 - RNA, 24 nt, Drosophila pseudoobscura
cgguauaccuucaguauacguaac

SEQ ID NO: 709 - RNA, 22 nt, Drosophila pseudoobscura
acguauacugaauguauccuga

SEQ ID NO: 710 - RNA, 22 nt, Danio rerio
ugagguaguagguuguauaguu

SEQ ID NO: 711 - RNA, 22 nt, Danio rerio
ugagguaguagguugugugguu

SEQ ID NO: 712 - RNA, 22 nt, Danio rerio
ugagguaguagguuguaugguu

SEQ ID NO: 713 - RNA, 22 nt, Danio rerio
ugagguaguugguuguaugguu

SEQ ID NO: 714 - RNA, 22 nt, Danio rerio
ugagguaguagauugaauaguu

SEQ ID NO: 715 - RNA, 22 nt, Danio rerio
ugagguaguagauuguauaguu

SEQ ID NO: 716 - RNA, 22 nt, Danio rerio
ugagguaguaguuuguauaguu

SEQ ID NO: 717 - RNA, 22 nt, Danio rerio
ugagguaguaaguuguguuguu

SEQ ID NO: 718 - RNA, 22 nt, Danio rerio
ugagguaguaguuugugcuguu

SEQ ID NO: 719 - RNA, 22 nt, Danio rerio
ugagguaguuguuuguacaguu

SEQ ID NO: 720 - RNA, 22 nt, Danio rerio
uggaauguaaagaaguauguau

SEQ ID NO: 721 - RNA, 22 nt, Danio rerio
aacccguagauccgaacuugug

SEQ ID NO: 722 - RNA, 22 nt, Danio rerio
uacaguacugugauaacugaag

SEQ ID NO: 723 - RNA, 22 nt, Danio rerio
uacaguacuaugauaacugaag

SEQ ID NO: 724 - RNA, 23 nt, Danio rerio
agcagcauuguacagggcuauga

SEQ ID NO: 725 - RNA, 23 nt, Danio rerio
agcagcauuguacagggcuauca

SEQ ID NO: 726 - RNA, 22 nt, Danio rerio
uacccuguagauccgaauuugu

SEQ ID NO: 727 - RNA, 22 nt, Danio rerio
caaauucgugucuuggggaaua

SEQ ID NO: 728 - RNA, 23 nt, Danio rerio
uacccuguagaaccgaauuugug

SEQ ID NO: 729 - RNA, 22 nt, Danio rerio
uacccuguagauccggauuugu

SEQ ID NO: 730 - RNA, 23 nt, Danio rerio
uacccuguagaaccgaaugugug

SEQ ID NO: 731 - RNA, 22 nt, Danio rerio
cagauucgguuuuaggggagua

SEQ ID NO: 732 - RNA, 22 nt, Danio rerio
uggagugugacaaugguguuug

SEQ ID NO: 733 - RNA, 22 nt, Danio rerio
uaaggcacgcggugaaugccaa

SEQ ID NO: 734 - RNA, 22 nt, Danio rerio
ucccugagacccuuaaccugug

SEQ ID NO: 735 - RNA, 22 nt, Danio rerio
ucccugagacccuaacuuguga

SEQ ID NO: 736 - RNA, 22 nt, Danio rerio
ucccugagacccuaacucguga

SEQ ID NO: 737 - RNA, 21 nt, Danio rerio
ucguaccgugaguaauaaugc

SEQ ID NO: 738 - RNA, 21 nt, Danio rerio
cauuauuacuuuugguacgcg

SEQ ID NO: 739 - RNA, 22 nt, Danio rerio
ucacagugaaccggucucuuuu

SEQ ID NO: 740 - RNA, 22 nt, Danio rerio
cuuuuugcggucugggcuugcu

SEQ ID NO: 741 - RNA, 22 nt, Danio rerio
aagcccuuaccccaaaaagcau

SEQ ID NO: 742 - RNA, 22 nt, Danio rerio
cagugcaauguuaaaagggcau

SEQ ID NO: 743 - RNA, 22 nt, Danio rerio
cagugcaauaaugaaagggcau

SEQ ID NO: 744 - RNA, 22 nt, Danio rerio
cagugcaauauuaaaagggcau

SEQ ID NO: 745 - RNA, 22 nt, Danio rerio
uaacagucuacagccauggucg

SEQ ID NO: 746 - RNA, 22 nt, Danio rerio
accguggcauuagauuguuacu

SEQ ID NO: 747 - RNA, 22 nt, Danio rerio
uuugguccccuucaaccagcug

SEQ ID NO: 748 - RNA, 22 nt, Danio rerio
agcugguaaaauggaaccaaau

SEQ ID NO: 749 - RNA, 22 nt, Danio rerio
uuugguccccuucaaccagcua

SEQ ID NO: 750 - RNA, 22 nt, Danio rerio
gcuggucaaauggaaccaaguc

SEQ ID NO: 751 - RNA, 22 nt, Danio rerio
uuuggucccuuucaaccagcua

SEQ ID NO: 752 - RNA, 23 nt, Danio rerio
uauggcuuuuuauuccuauguga

SEQ ID NO: 753 - RNA, 22 nt, Danio rerio
uauggcuuuuuauuccuaucug

SEQ ID NO: 754 - RNA, 22 nt, Danio rerio
uauggcuuucuauuccuaugug

SEQ ID NO: 755 - RNA, 22 nt, Danio rerio
uuauugcuuaagaauacgcgua

SEQ ID NO: 756 - RNA, 22 nt, Danio rerio
agcugguguugugaaucaggcc

SEQ ID NO: 757 - RNA, 18 nt, Danio rerio
ucuacagugcaugugucu

SEQ ID NO: 758 - RNA, 22 nt, Danio rerio
cagugguuuuacccuaugguag

SEQ ID NO: 759 - RNA, 23 nt, Danio rerio
uaccacaggguagaaccacggac

SEQ ID NO: 760 - RNA, 22 nt, Danio rerio
uaacacugucugguaacgaugc

SEQ ID NO: 761 - RNA, 23 nt, Danio rerio
uguaguguuuccuacuuuaugga

SEQ ID NO: 762 - RNA, 21 nt, Danio rerio
cauaaaguagaaagcacuacu

SEQ ID NO: 763 - RNA, 22 nt, Danio rerio
cauaaaguagacagcacuacua

SEQ ID NO: 764 - RNA, 21 nt, Danio rerio
ugagaugaagcacuguagcuc

SEQ ID NO: 765 - RNA, 20 nt, Danio rerio
uacaguauagaugauguacu

SEQ ID NO: 766 - RNA, 22 nt, Danio rerio
guccaguuuucccaggaauccc

SEQ ID NO: 767 - RNA, 23 nt, Danio rerio
ugagaacugaauuccauagaugg

SEQ ID NO: 768 - RNA, 22 nt, Danio rerio
ugagaacugaauuccaagggug

SEQ ID NO: 769 - RNA, 22 nt, Danio rerio
ucagugcauuacagaacuuugu

SEQ ID NO: 770 - RNA, 22 nt, Danio rerio
ucucccaauccuuguaccagug

SEQ ID NO: 771 - RNA, 22 nt, Danio rerio
ucagugcaugacagaacuuugg

SEQ ID NO: 772 - RNA, 22 nt, Danio rerio
uugcauagucacaaaagugauc

SEQ ID NO: 773 - RNA, 22 nt, Danio rerio
uugcauagucacaaaaaugagc

SEQ ID NO: 774 - RNA, 22 nt, Danio rerio
uugcauagucacaaaaaugauc

SEQ ID NO: 775 - RNA, 22 nt, Danio rerio
uuaaugcuaaucgugauagggg

SEQ ID NO: 776 - RNA, 22 nt, Danio rerio
uagcagcacagaaugguuugug

SEQ ID NO: 777 - RNA, 22 nt, Danio rerio
caggccguacugugcugcggca

SEQ ID NO: 778 - RNA, 22 nt, Danio rerio
uagcagcacaucaugguuugua

SEQ ID NO: 779 - RNA, 21 nt, Danio rerio
aagcagcgcgucaugguuuuc

SEQ ID NO: 780 - RNA, 22 nt, Danio rerio
uagcagcacguaaauauuggug

SEQ ID NO: 781 - RNA, 22 nt, Danio rerio
uagcagcacguaaauauuggag

SEQ ID NO: 782 - RNA, 22 nt, Danio rerio
uagcagcauguaaauauuggag

SEQ ID NO: 783 - RNA, 22 nt, Danio rerio
caaagugcuuacagugcaggua

SEQ ID NO: 784 - RNA, 22 nt, Danio rerio
acugcaguggaggcacuucuag

SEQ ID NO: 785 - RNA, 23 nt, Danio rerio
aacauucaacgcugucggugagu

SEQ ID NO: 786 - RNA, 22 nt, Danio rerio
accaucgaccguugauuguacc

SEQ ID NO: 787 - RNA, 22 nt, Danio rerio
aacauucauugcugucgguggg

SEQ ID NO: 788 - RNA, 22 nt, Danio rerio
cacauucauugcugucgguggg

SEQ ID NO: 789 - RNA, 22 nt, Danio rerio
uuuggcaaugguagaacucaca

SEQ ID NO: 790 - RNA, 21 nt, Danio rerio
ugguucuagacuugccaacua

SEQ ID NO: 791 - RNA, 23 nt, Danio rerio
uauggcacugguagaauucacug

SEQ ID NO: 792 - RNA, 22 nt, Danio rerio
uggacggagaacugauaagggc

SEQ ID NO: 793 - RNA, 20 nt, Danio rerio
ucgugucuuguguugcagcc

SEQ ID NO: 794 - RNA, 22 nt, Danio rerio
uaaggugcaucuagugcagaua

SEQ ID NO: 795 - RNA, 22 nt, Danio rerio
uaaggugcauuuagugcagaua

SEQ ID NO: 796 - RNA, 22 nt, Danio rerio
cugcccuaagugccccuucugg

SEQ ID NO: 797 - RNA, 22 nt, Danio rerio
uaaggugcaucuuguguaguua

SEQ ID NO: 798 - RNA, 22 nt, Danio rerio
ugauauguuugauauauuaggu

SEQ ID NO: 799 - RNA, 22 nt, Danio rerio
ugauauguuugauauucgguug

SEQ ID NO: 800 - RNA, 21 nt, Danio rerio
augaccuaugaauugacagcc

SEQ ID NO: 801 - RNA, 22 nt, Danio rerio
aacuggccuacaaagucccagu

SEQ ID NO: 802 - RNA, 22 nt, Danio rerio
aacuggcccgcaaagucccgcu

SEQ ID NO: 803 - RNA, 21 nt, Danio rerio
uguaacagcaacuccaugugg

SEQ ID NO: 804 - RNA, 22 nt, Danio rerio
uguaacagccgcuccaugugga

SEQ ID NO: 805 - RNA, 22 nt, Danio rerio
uagguaguuucauguuguuggg

SEQ ID NO: 806 - RNA, 22 nt, Danio rerio
uagguaguuucaaguuguuggg

SEQ ID NO: 807 - RNA, 23 nt, Danio rerio
cccaguguucagacuaccuguuc

SEQ ID NO: 808 - RNA, 22 nt, Danio rerio
uacaguagucugcacauugguu

SEQ ID NO: 809 - RNA, 23 nt, Danio rerio
ugugcaaaucuaugcaaaacuga

SEQ ID NO: 810 - RNA, 22 nt, Danio rerio
cuaguuuugcauaguugcacua

SEQ ID NO: 811 - RNA, 23 nt, Danio rerio
ugugcaaauccaugcaaaacuga

SEQ ID NO: 812 - RNA, 22 nt, Danio rerio
aguuuugcugguuugcauucag

SEQ ID NO: 813 - RNA, 23 nt, Danio rerio
ugugcaaauccaugcaaaacucg

SEQ ID NO: 814 - RNA, 23 nt, Danio rerio
ugugcaaacccaugcaaaacuga

SEQ ID NO: 815 - RNA, 22 nt, Danio rerio
uaacacugucugguaacgaugu

SEQ ID NO: 816 - RNA, 22 nt, Danio rerio
uaauacugccugguaaugauga

SEQ ID NO: 817 - RNA, 22 nt, Danio rerio
uaauacugccugguaaugaugc

SEQ ID NO: 818 - RNA, 22 nt, Danio rerio
agaggcauagggcaugggaaaa

SEQ ID NO: 819 - RNA, 22 nt, Danio rerio
uuccuaugcauauaccucuuug

SEQ ID NO: 820 - RNA, 22 nt, Danio rerio
gugaaauguuuaggaccacuug

SEQ ID NO: 821 - RNA, 22 nt, Danio rerio
gugaaauguucaggaccacuug

SEQ ID NO: 822 - RNA, 22 nt, Danio rerio
agugguucucaacaguucaaca

SEQ ID NO: 823 - RNA, 22 nt, Danio rerio
uucccuuugucauccuaugccu

SEQ ID NO: 824 - RNA, 22 nt, Danio rerio
uccuucauuccaccggagucug

SEQ ID NO: 825 - RNA, 22 nt, Danio rerio
uggaauguaaggaagugugugg

SEQ ID NO: 826 - RNA, 23 nt, Danio rerio
uaaagugcuuauagugcagguag

SEQ ID NO: 827 - RNA, 22 nt, Danio rerio
acugcagugugagcacuugaag

SEQ ID NO: 828 - RNA, 23 nt, Danio rerio
caaagugcucacagugcagguag

SEQ ID NO: 829 - RNA, 23 nt, Danio rerio
uagcuuaucagacugguguuggc

SEQ ID NO: 830 - RNA, 22 nt, Danio rerio
cugugcgugugacagcggcuaa

SEQ ID NO: 831 - RNA, 22 nt, Danio rerio
agccacugacuaacgcacauug

SEQ ID NO: 832 - RNA, 21 nt, Danio rerio
uaacagucuacagucauggcu

SEQ ID NO: 833 - RNA, 21 nt, Danio rerio
acagcaggcacagacaggcag

SEQ ID NO: 834 - RNA, 22 nt, Danio rerio
uaaucucagcuggcaacuguga

SEQ ID NO: 835 - RNA, 22 nt, Danio rerio
uaaucucugcaggcaacuguga

SEQ ID NO: 836 - RNA, 22 nt, Danio rerio
uacugcaucaggaacugauugg

SEQ ID NO: 837 - RNA, 22 nt, Danio rerio
uugugcuugaucuaaccaugug

SEQ ID NO: 838 - RNA, 22 nt, Danio rerio
uugugcuugaucuaaccaugca

SEQ ID NO: 839 - RNA, 22 nt, Danio rerio
ugauuguccaaacgcaauucuu

SEQ ID NO: 840 - RNA, 21 nt, Danio rerio
ccacaaccguaucggacacuu

SEQ ID NO: 841 - RNA, 23 nt, Danio rerio
agcuacauugucugcuggguuuc

SEQ ID NO: 842 - RNA, 24 nt, Danio rerio
agcuacaucuggcuacugggucuc

SEQ ID NO: 843 - RNA, 21 nt, Danio rerio
ugucaguuugucaaauacccc

SEQ ID NO: 844 - RNA, 22 nt, Danio rerio
aagcugccagcugaagaacugu

SEQ ID NO: 845 - RNA, 22 nt, Danio rerio
aagcugccaguugaagagcugu

SEQ ID NO: 846 - RNA, 22 nt, Danio rerio
aucacauugccagggauuucca

SEQ ID NO: 847 - RNA, 22 nt, Danio rerio
aucacauugccagggauuacca

SEQ ID NO: 848 - RNA, 22 nt, Danio rerio
uggcucaguucagcaggaacag

SEQ ID NO: 849 - RNA, 22 nt, Danio rerio
cauugcacuugucucggucuga

SEQ ID NO: 850 - RNA, 22 nt, Danio rerio
uucaaguaauccaggauaggcu

SEQ ID NO: 851 - RNA, 22 nt, Danio rerio
uucaaguaauccaggauagguu

SEQ ID NO: 852 - RNA, 22 nt, Danio rerio
uucacaguggcuaaguuccgcu

SEQ ID NO: 853 - RNA, 22 nt, Danio rerio
uucacaguggcuaaguucugca

SEQ ID NO: 854 - RNA, 21 nt, Danio rerio
uucacagugguuaaguucugc

SEQ ID NO: 855 - RNA, 22 nt, Danio rerio
cuuaacccacuugugaacaaug

SEQ ID NO: 856 - RNA, 22 nt, Danio rerio
uucacaguggcuaaguucuuca

SEQ ID NO: 857 - RNA, 22 nt, Danio rerio
uucacaguggcuaaguucagug

SEQ ID NO: 858 - RNA, 22 nt, Danio rerio
uagcaccauuugaaaucgguua

SEQ ID NO: 859 - RNA, 22 nt, Danio rerio
uagcaccauuugaaaucagugu

SEQ ID NO: 860 - RNA, 22 nt, Danio rerio
cagugcaauaguauugucaaag

SEQ ID NO: 861 - RNA, 22 nt, Danio rerio
cagugcaauaguauugucauug

SEQ ID NO: 862 - RNA, 22 nt, Danio rerio
cagugcaauaguauugucauag

SEQ ID NO: 863 - RNA, 22 nt, Danio rerio
uguaaacauucccgacuggaag

SEQ ID NO: 864 - RNA, 22 nt, Danio rerio
uguaaacauccuacacucagcu

SEQ ID NO: 865 - RNA, 22 nt, Danio rerio
uguaaacauccuacacucucag

SEQ ID NO: 866 - RNA, 22 nt, Danio rerio
uguaaacauccccgacuggaag

SEQ ID NO: 867 - RNA, 22 nt, Danio rerio
uguaaacauccuugacuggaag

SEQ ID NO: 868 - RNA, 22 nt, Danio rerio
cuuucagucggauguuugcagc

SEQ ID NO: 869 - RNA, 21 nt, Danio rerio
ggcaagauguuggcauagcug

SEQ ID NO: 870 - RNA, 22 nt, Danio rerio
uccagcaucagugauuuuguug

SEQ ID NO: 871 - RNA, 22 nt, Danio rerio
uggcagugucuuagcugguugu

SEQ ID NO: 872 - RNA, 23 nt, Danio rerio
uaggcaguguuguuagcugauug

SEQ ID NO: 873 - RNA, 23 nt, Danio rerio
aggcagugcaguuaguugauuac

SEQ ID NO: 874 - RNA, 22 nt, Danio rerio
aauugcacgguauccaucugua

SEQ ID NO: 875 - RNA, 22 nt, Danio rerio
uaaugccccuaaaaauccuuau

SEQ ID NO: 876 - RNA, 22 nt, Danio rerio
uuuguucguucggcucgcguua

SEQ ID NO: 877 - RNA, 22 nt, Danio rerio
uaauacugucugguaaugccgu

SEQ ID NO: 878 - RNA, 22 nt, Danio rerio
uaagugcuauuuguugggguag

SEQ ID NO: 879 - RNA, 23 nt, Danio rerio
aaagugcuaucaaguugggguag

SEQ ID NO: 880 - RNA, 22 nt, Danio rerio
uaagugcuucucuuugggguag

SEQ ID NO: 881 - RNA, 22 nt, Danio rerio
uaagugcuauuuguuggcguag

SEQ ID NO: 882 - RNA, 22 nt, Danio rerio
aaagugcuaucaaauuggggua

SEQ ID NO: 883 - RNA, 22 nt, Danio rerio
aaaccguuaccauuacugaguu

SEQ ID NO: 884 - RNA, 22 nt, Danio rerio
uagugcaauauugcuaauaggg

SEQ ID NO: 885 - RNA, 22 nt, Danio rerio
uagugcaauauugcuuauaggg

SEQ ID NO: 886 - RNA, 22 nt, Danio rerio
uaugugcccuuggacuacaucg

SEQ ID NO: 887 - RNA, 22 nt, Danio rerio
caggcugguuagaugguuguca

SEQ ID NO: 888 - RNA, 22 nt, Danio rerio
aagcagcacaucaauauuggca

SEQ ID NO: 889 - RNA, 22 nt, Danio rerio
aagcagcacauaaauacuggag

SEQ ID NO: 890 - RNA, 22 nt, Danio rerio
auagcucuuugaaugguacugc

SEQ ID NO: 891 - RNA, 22 nt, Danio rerio
ucaguaacaaggauucauccug

SEQ ID NO: 892 - RNA, 22 nt, Danio rerio
cagggaaucucuguuacugggg

SEQ ID NO: 893 - RNA, 22 nt, Danio rerio
cacagcgcauacaauguggaug

SEQ ID NO: 894 - RNA, 22 nt, Danio rerio
ccugcauuguacacacugugcg

SEQ ID NO: 895 - RNA, 22 nt, Danio rerio
ucaggaaugggcuaaaugccaa

SEQ ID NO: 896 - RNA, 22 nt, Danio rerio
uaacggaacccauaaugcagcu

SEQ ID NO: 897 - RNA, 23 nt, Danio rerio
agugacaucauauguacggcugc

SEQ ID NO: 898 - RNA, 22 nt, Danio rerio
uuaagacuugcagugauguuua

SEQ ID NO: 899 - RNA, 24 nt, Danio rerio
uuuuuugcagaaacguuucagauu

SEQ ID NO: 900 - RNA, 23 nt, Danio rerio
aagacaucaauuaaaucugugcu

SEQ ID NO: 901 - RNA, 24 nt, Danio rerio
gacaguuuuaaaugauguuacuuu

SEQ ID NO: 902 - RNA, 22 nt, Danio rerio
uuaaagggaauuugcgacuguu

SEQ ID NO: 903 - RNA, 22 nt, Danio rerio
uucagucauuguuucuaguagu

SEQ ID NO: 904 - RNA, 21 nt, Danio rerio
uucacuacuagcagaacucgg

SEQ ID NO: 905 - RNA, 22 nt, Danio rerio
guugaggcgaguugaagacuua

SEQ ID NO: 906 - RNA, 22 nt, Danio rerio
ucagucuucaauuccucccagc

SEQ ID NO: 907 - RNA, 22 nt, Danio rerio
auacuaaguacacuacguuuuc

SEQ ID NO: 908 - RNA, 24 nt, Danio rerio
cauggguaugauacgaccuggguu

SEQ ID NO: 909 - RNA, 23 nt, Danio rerio
uccucauugugcaugcugugugu

SEQ ID NO: 910 - RNA, 24 nt, Danio rerio
aaugacacguuuucucccggaucg

SEQ ID NO: 911 - RNA, 22 nt, Danio rerio
cucaaagcagagaacucucggu

SEQ ID NO: 912 - RNA, 23 nt, Danio rerio
ugcguugguuuagcucagugguu

SEQ ID NO: 913 - RNA, 23 nt, Danio rerio
guaaaugcugcagaaucguaccg

SEQ ID NO: 914 - RNA, 22 nt, Danio rerio
cucucccaccgcuaaacuugac

SEQ ID NO: 915 - RNA, 21 nt, Danio rerio
guaagacgaacaaaaaguuuu

SEQ ID NO: 916 - RNA, 21 nt, Danio rerio
aaucaaaaccuaaagaaaaua

SEQ ID NO: 917 - RNA, 23 nt, Danio rerio
gcuacggcccgcgucgggaccuc

SEQ ID NO: 918 - RNA, 21 nt, Danio rerio
aggccgaaguggagaaggguu

SEQ ID NO: 919 - RNA, 22 nt, Danio rerio
auaaaaagugguaugguacagu

SEQ ID NO: 920 - RNA, 23 nt, Danio rerio
uggaagacuagugauuuuguugu

SEQ ID NO: 921 - RNA, 21 nt, Danio rerio
uggaagacuugugauuuuguu

SEQ ID NO: 922 - RNA, 23 nt, Danio rerio
ucuuugguuaucuagcuguauga

SEQ ID NO: 923 - RNA, 21 nt, Danio rerio
uaaagcuagauaaccgaaagu

SEQ ID NO: 924 - RNA, 22 nt, Danio rerio
uauugcacuugucccggccugu

SEQ ID NO: 925 - RNA, 22 nt, Danio rerio
uauugcacucgucccggccucc

SEQ ID NO: 926 - RNA, 22 nt, Danio rerio
aaaagugcuguuugugcaggua

SEQ ID NO: 927 - RNA, 23 nt, Danio rerio
uuuggcacuagcacauuuuugcu

SEQ ID NO: 928 - RNA, 22 nt, Danio rerio
aacccguagauccgaucuugug

SEQ ID NO: 929 - RNA, 23 nt, Epstein Barr virus
uagcaccgcuauccacuaugucu

SEQ ID NO: 930 - RNA, 23 nt, Epstein Barr virus
ucuuaguggaagugacgugcugu

SEQ ID NO: 931 - RNA, 22 nt, Epstein Barr virus
acauaaccauggaguuggcugu

SEQ ID NO: 932 - RNA, 21 nt, Epstein Barr virus
acgcacaccaggcugacugcc

SEQ ID NO: 933 - RNA, 22 nt, Epstein Barr virus
gacaguuuggugcgcuaguugu

SEQ ID NO: 934 - RNA, 23 nt, Epstein Barr virus
uccugugguguuuggugugguuu

SEQ ID NO: 935 - RNA, 23 nt, Epstein Barr virus
uguaacuugccagggacggcuga

SEQ ID NO: 936 - RNA, 22 nt, Epstein Barr virus
uaaaugcugcaguaguagggau

SEQ ID NO: 937 - RNA, 22 nt, Epstein Barr virus
uacccuacgcugccgauuuaca

SEQ ID NO: 938 - RNA, 22 nt, Epstein Barr virus
agugguuuuguuuccuugauag

SEQ ID NO: 939 - RNA, 22 nt, Epstein Barr virus
auagagugggugugugcucuug

SEQ ID NO: 940 - RNA, 22 nt, Epstein Barr virus
uuguaugccugguguccccuua

SEQ ID NO: 941 - RNA, 22 nt, Epstein Barr virus
aagaggacgcaggcauacaagg

SEQ ID NO: 942 - RNA, 22 nt, Epstein Barr virus
caaguucgcacuuccuauacag

SEQ ID NO: 943 - RNA, 22 nt, Epstein Barr virus
uguuuuguuugcuugggaaugc

SEQ ID NO: 944 - RNA, 22 nt, Epstein Barr virus
uauuuucugcauucgcccuugc

SEQ ID NO: 945 - RNA, 22 nt, Epstein Barr virus
caugaaggcacagccuguuacc

SEQ ID NO: 946 - RNA, 22 nt, Epstein Barr virus
guagcaggcaugucuucauucc

SEQ ID NO: 947 - RNA, 22 nt, Epstein Barr virus
cgcaccacuagucaccaggugu

SEQ ID NO: 948 - RNA, 22 nt, Epstein Barr virus
aaccuaguguuaguguugugcu

SEQ ID NO: 949 - RNA, 22 nt, Epstein Barr virus
gaccugaugcugcuggugugcu

SEQ ID NO: 950 - RNA, 24 nt, Epstein Barr virus
caaggugaauauagcugcccaucg

SEQ ID NO: 951 - RNA, 22 nt, Epstein Barr virus
cggggaucggacuagccuuaga

SEQ ID NO: 952 - RNA, 22 nt, Epstein Barr virus
gguugguccaauccauaggcuu

SEQ ID NO: 953 - RNA, 22 nt, Epstein Barr virus
caucauaguccaguguccaggg

SEQ ID NO: 954 - RNA, 22 nt, Epstein Barr virus
gucacaaucuauggggucguag

SEQ ID NO: 955 - RNA, 22 nt, Epstein Barr virus
uacgguuuccuagauuguacag

SEQ ID NO: 956 - RNA, 22 nt, Epstein Barr virus
uaacacuucaugggucccguag

SEQ ID NO: 957 - RNA, 22 nt, Epstein Barr virus
uaaccugaucagccccggaguu

SEQ ID NO: 958 - RNA, 23 nt, Epstein Barr virus
uaucuuuugcggcagaaauugaa

SEQ ID NO: 959 - RNA, 22 nt, Epstein Barr virus
aaauucuguugcagcagauagc

SEQ ID NO: 960 - RNA, 23 nt, Epstein Barr virus
uaacgggaaguguguaagcacac

SEQ ID NO: 961 - RNA, 22 nt, Fugu rubripes
ugagguaguagguuguauaguu

SEQ ID NO: 962 - RNA, 22 nt, Fugu rubripes
ugagguaguagguugugugguu

SEQ ID NO: 963 - RNA, 22 nt, Fugu rubripes
ugagguaguugguuguaugguu

SEQ ID NO: 964 - RNA, 22 nt, Fugu rubripes
ugagguaguagauugaauaguu

SEQ ID NO: 965 - RNA, 22 nt, Fugu rubripes
ugagguaguaguuuguauaguu

SEQ ID NO: 966 - RNA, 22 nt, Fugu rubripes
ugagguaguaaguuguguuguu

SEQ ID NO: 967 - RNA, 22 nt, Fugu rubripes
ugagguaguaguuugugcuguu

SEQ ID NO: 968 - RNA, 22 nt, Fugu rubripes
ugagguaguuuuuuguacaguu

SEQ ID NO: 969 - RNA, 22 nt, Fugu rubripes
uggaauguaaagaaguauguau

SEQ ID NO: 970 - RNA, 22 nt, Fugu rubripes
aacccguagauccgaacuugug

SEQ ID NO: 971 - RNA, 22 nt, Fugu rubripes
uacaguacugugauaacugaag

SEQ ID NO: 972 - RNA, 22 nt, Fugu rubripes
uacaguacuaugauaacugaag

SEQ ID NO: 973 - RNA, 23 nt, Fugu rubripes
agcagcauuguacagggcuauga

SEQ ID NO: 974 - RNA, 23 nt, Fugu rubripes
agcagcauuguacagggcuauca

SEQ ID NO: 975 - RNA, 23 nt, Fugu rubripes
uacccuguagaaccgaauuugug

SEQ ID NO: 976 - RNA, 22 nt, Fugu rubripes
uacccuguagauccggauuugu

SEQ ID NO: 977 - RNA, 25 nt, Fugu rubripes
uacccuguagaaccgaaugugugug

SEQ ID NO: 978 - RNA, 22 nt, Fugu rubripes
uggagugugacaaugguguuug

SEQ ID NO: 979 - RNA, 22 nt, Fugu rubripes
uaaggcacgcggugaaugccaa

SEQ ID NO: 980 - RNA, 22 nt, Fugu rubripes
ucccugagacccuuaaccugug

SEQ ID NO: 981 - RNA, 22 nt, Fugu rubripes
ucccugagacccuaacuuguga

SEQ ID NO: 982 - RNA, 21 nt, Fugu rubripes
ucguaccgugaguaauaaugc

SEQ ID NO: 983 - RNA, 22 nt, Fugu rubripes
ucacagugaaccggucucuuuu

SEQ ID NO: 984 - RNA, 22 nt, Fugu rubripes
cuuuuugcggucugggcuugcu

SEQ ID NO: 985 - RNA, 22 nt, Fugu rubripes
cagugcaauauuaaaagggcau

SEQ ID NO: 986 - RNA, 22 nt, Fugu rubripes
uaacagucuacagccauggucg

SEQ ID NO: 987 - RNA, 22 nt, Fugu rubripes
uuugguccccuucaaccagcug

SEQ ID NO: 988 - RNA, 22 nt, Fugu rubripes
uauggcuuucuauuccuaugug

SEQ ID NO: 989 - RNA, 22 nt, Fugu rubripes
uauggcuuuuuauuccuaucug

SEQ ID NO: 990 - RNA, 22 nt, Fugu rubripes
uuauugcuuaagaauacgcgua

SEQ ID NO: 991 - RNA, 22 nt, Fugu rubripes
agcugguguugugaaucaggcc

SEQ ID NO: 992 - RNA, 22 nt, Fugu rubripes
cagugguuuuacccuaugguag

SEQ ID NO: 993 - RNA, 21 nt, Fugu rubripes
cauaaaguagaaagcacuacu

SEQ ID NO: 994 - RNA, 22 nt, Fugu rubripes
cauaaaguagaaagcacuacua

SEQ ID NO: 995 - RNA, 20 nt, Fugu rubripes
uacaguauagaugauguacu

SEQ ID NO: 996 - RNA, 22 nt, Fugu rubripes
ucagugcauuacagaacuuugu

SEQ ID NO: 997 - RNA, 22 nt, Fugu rubripes
ucagugcauaacagaacuuugu

SEQ ID NO: 998 - RNA, 22 nt, Fugu rubripes
uugcauagucacaaaagugauc

SEQ ID NO: 999 - RNA, 22 nt, Fugu rubripes
uugcauagucacaaaaaugagc

SEQ ID NO: 1000 - RNA, 22 nt, Fugu rubripes
uagcagcacggaaugguuugug

SEQ ID NO: 1001 - RNA, 22 nt, Fugu rubripes
uagcagcgcaucaugguuugua

SEQ ID NO: 1002 - RNA, 22 nt, Fugu rubripes
uagcagcacguaaauauuggag

SEQ ID NO: 1003 - RNA, 22 nt, Fugu rubripes
caaagugcuuacagugcaggua

SEQ ID NO: 1004 - RNA, 22 nt, Fugu rubripes
uaaggugcaucuagugcagaua

SEQ ID NO: 1005 - RNA, 23 nt, Fugu rubripes
aacauucaacgcugucggugagu

SEQ ID NO: 1006 - RNA, 22 nt, Fugu rubripes
accaucgaccguugauuguacc

SEQ ID NO: 1007 - RNA, 22 nt, Fugu rubripes
aacauucauugcugucgguggg

SEQ ID NO: 1008 - RNA, 21 nt, Fugu rubripes
ugguucuagacuugccaacua

SEQ ID NO: 1009 - RNA, 23 nt, Fugu rubripes
uauggcacugguagaauucacug

SEQ ID NO: 1010 - RNA, 21 nt, Fugu rubripes
uggacggagaacugauaaggg

SEQ ID NO: 1011 - RNA, 20 nt, Fugu rubripes
ucgugucuuguguugcagcc

SEQ ID NO: 1012 - RNA, 23 nt, Fugu rubripes
gugccuacugaacugguaucagu

SEQ ID NO: 1013 - RNA, 22 nt, Fugu rubripes
ugauauguuugauauauuaggu

SEQ ID NO: 1014 - RNA, 21 nt, Fugu rubripes
augaccuaugaauugacagcc

SEQ ID NO: 1015 - RNA, 22 nt, Fugu rubripes
aacuggccuacaaagucccagu

SEQ ID NO: 1016 - RNA, 21 nt, Fugu rubripes
uguaacagcaacuccaugugg

SEQ ID NO: 1017 - RNA, 22 nt, Fugu rubripes
uagguaguuucauguuguuggg

SEQ ID NO: 1018 - RNA, 22 nt, Fugu rubripes
uagguaguuucaaguuguuggg

SEQ ID NO: 1019 - RNA, 23 nt, Fugu rubripes
cccaguguucagacuaccuguuc

SEQ ID NO: 1020 - RNA, 23 nt, Fugu rubripes
ugugcaaaucuaugcaaaacuga

SEQ ID NO: 1021 - RNA, 23 nt, Fugu rubripes
ugugcaaauccaugcaaaacuga

SEQ ID NO: 1022 - RNA, 23 nt, Fugu rubripes
uaaagugcuuauagugcagguag

SEQ ID NO: 1023 - RNA, 22 nt, Fugu rubripes
uaacacugucugguaacgaugu

SEQ ID NO: 1024 - RNA, 22 nt, Fugu rubripes
uaauacugccugguaaugauga

SEQ ID NO: 1025 - RNA, 22 nt, Fugu rubripes
agaggcauagggcaugggaaaa

SEQ ID NO: 1026 - RNA, 22 nt, Fugu rubripes
gugaaauguuuaggaccacuug

SEQ ID NO: 1027 - RNA, 22 nt, Fugu rubripes
uucccuuugucauccuaugccu

SEQ ID NO: 1028 - RNA, 22 nt, Fugu rubripes
uccuucauuccaccggagucug

SEQ ID NO: 1029 - RNA, 23 nt, Fugu rubripes
uagcuuaucagacugguguuggc

SEQ ID NO: 1030 - RNA, 22 nt, Fugu rubripes
cugugcgugugacagcggcuaa

SEQ ID NO: 1031 - RNA, 21 nt, Fugu rubripes
uaacagucuacagucauggcu

SEQ ID NO: 1032 - RNA, 21 nt, Fugu rubripes
acagcaggcacagacaggcag

SEQ ID NO: 1033 - RNA, 22 nt, Fugu rubripes
aaaucucagcuggcaacuguga

SEQ ID NO: 1034 - RNA, 22 nt, Fugu rubripes
uaaucucugcaggcaacuguga

SEQ ID NO: 1035 - RNA, 22 nt, Fugu rubripes
uacugcaucaggaacugauugg

SEQ ID NO: 1036 - RNA, 22 nt, Fugu rubripes
uugugcuugaucuaaccaugug

SEQ ID NO: 1037 - RNA, 22 nt, Fugu rubripes
uugugcuugaucuaaccaugca

SEQ ID NO: 1038 - RNA, 22 nt, Fugu rubripes
ugauuguccaaacgcaauucuu

SEQ ID NO: 1039 - RNA, 23 nt, Fugu rubripes
agcuacauugucugcuggguuuc

SEQ ID NO: 1040 - RNA, 24 nt, Fugu rubripes
agcuacaucuggcuacugggucuc

SEQ ID NO: 1041 - RNA, 21 nt, Fugu rubripes
ugucaguuugucaaauacccc

SEQ ID NO: 1042 - RNA, 22 nt, Fugu rubripes
aagcugccagcugaagaacugu

SEQ ID NO: 1043 - RNA, 22 nt, Fugu rubripes
aagcugccaguugaagagcugu

SEQ ID NO: 1044 - RNA, 22 nt, Fugu rubripes
aucacauugccagggauuucca

SEQ ID NO: 1045 - RNA, 22 nt, Fugu rubripes
aucacauugccagggauuacca

SEQ ID NO: 1046 - RNA, 22 nt, Fugu rubripes
uggcucaguucagcaggaacag

SEQ ID NO: 1047 - RNA, 22 nt, Fugu rubripes
cauugcacuugucucggucuga

SEQ ID NO: 1048 - RNA, 22 nt, Fugu rubripes
uucaaguaauccaggauaggcu

SEQ ID NO: 1049 - RNA, 22 nt, Fugu rubripes
uucacaguggcuaaguucugca

SEQ ID NO: 1050 - RNA, 21 nt, Fugu rubripes
uucacagugguuaaguucugc

SEQ ID NO: 1051 - RNA, 22 nt, Fugu rubripes
uucacaguggcuaaguucagug

SEQ ID NO: 1052 - RNA, 22 nt, Fugu rubripes
uagcaccauuugaaaucgguua

SEQ ID NO: 1053 - RNA, 22 nt, Fugu rubripes
uagcaccauuugaaaucagugu

SEQ ID NO: 1054 - RNA, 22 nt, Fugu rubripes
cagugcaauaguauugucauag

SEQ ID NO: 1055 - RNA, 22 nt, Fugu rubripes
uguaaacauccuacacucagcu

SEQ ID NO: 1056 - RNA, 22 nt, Fugu rubripes
uguaaacauccuacacucucgg

SEQ ID NO: 1057 - RNA, 22 nt, Fugu rubripes
uguaaacauccccgacuggaag

SEQ ID NO: 1058 - RNA, 22 nt, Fugu rubripes
uccagcaucagugauuuuguug

SEQ ID NO: 1059 - RNA, 22 nt, Fugu rubripes
uaaugccccuaaaaauccuuau

SEQ ID NO: 1060 - RNA, 22 nt, Fugu rubripes
uuuguucguucggcucgcguua

SEQ ID NO: 1061 - RNA, 22 nt, Fugu rubripes
uaauacugucugguaaugccgu

SEQ ID NO: 1062 - RNA, 22 nt, Fugu rubripes
uaugugcccuuggacuacaucg

SEQ ID NO: 1063 - RNA, 22 nt, Fugu rubripes
auagcucuuuaaaugguacugc

SEQ ID NO: 1064 - RNA, 22 nt, Fugu rubripes
cacagcgcauacaauguggaug

SEQ ID NO: 1065 - RNA, 23 nt, Fugu rubripes
agugacaucauauguacggcugc

SEQ ID NO: 1066 - RNA, 21 nt, Fugu rubripes
uggaagacuagugauuuuguu

SEQ ID NO: 1067 - RNA, 23 nt, Fugu rubripes
ucuuugguuaucuagcuguauga

SEQ ID NO: 1068 - RNA, 22 nt, Fugu rubripes
uauugcacuugucccggccugu

SEQ ID NO: 1069 - RNA, 23 nt, Fugu rubripes
uuuggcacuagcacauuuuugcu

SEQ ID NO: 1070 - RNA, 22 nt, Gallus gallus
ugagguaguagguuguauaguu

SEQ ID NO: 1071 - RNA, 22 nt, Gallus gallus
ugagguaguagguugugugguu

SEQ ID NO: 1072 - RNA, 22 nt, Gallus gallus
ugagguaguagguuguaugguu

SEQ ID NO: 1073 - RNA, 21 nt, Gallus gallus
agagguaguggguugcauagu

SEQ ID NO: 1074 - RNA, 22 nt, Gallus gallus
ugagguaguagauuguauaguu

SEQ ID NO: 1075 - RNA, 21 nt, Gallus gallus
ugagguaguaguuuguacagu

SEQ ID NO: 1076 - RNA, 21 nt, Gallus gallus
ugagguaguaguuugugcugu

SEQ ID NO: 1077 - RNA, 22 nt, Gallus gallus
ugagguaguagguuguauaguu

SEQ ID NO: 1078 - RNA, 22 nt, Gallus gallus
ugagguaguagauugaauaguu

SEQ ID NO: 1079 - RNA, 22 nt, Gallus gallus
aacccguagauccgaacuugug

SEQ ID NO: 1080 - RNA, 22 nt, Gallus gallus
uacaguacugugauaacugaag

SEQ ID NO: 1081 - RNA, 23 nt, Gallus gallus
agcagcauuguacagggcuauga

SEQ ID NO: 1082 - RNA, 22 nt, Gallus gallus
aaaagugcuuacagugcaggua

SEQ ID NO: 1083 - RNA, 23 nt, Gallus gallus
agcagcauuguacagggcuauca

SEQ ID NO: 1084 - RNA, 22 nt, Gallus gallus
uacccuguagaaccgaauuugu

SEQ ID NO: 1085 - RNA, 23 nt, Gallus gallus
uggagugugacaaugguguuugu

SEQ ID NO: 1086 - RNA, 22 nt, Gallus gallus
uuaaggcacgcggugaaugcca

SEQ ID NO: 1087 - RNA, 22 nt, Gallus gallus
uuaaggcacgcagugaaugcca

SEQ ID NO: 1088 - RNA, 22 nt, Gallus gallus
ucccugagacccuaacuuguga

SEQ ID NO: 1089 - RNA, 23 nt, Gallus gallus
ucguaccgugaguaauaaugcgc

SEQ ID NO: 1090 - RNA, 21 nt, Gallus gallus
cauuauuacuuuugguacgcg

SEQ ID NO: 1091 - RNA, 21 nt, Gallus gallus
ucacagugaaccggucucuuu

SEQ ID NO: 1092 - RNA, 22 nt, Gallus gallus
cagugcaauauuaaaagggcau

SEQ ID NO: 1093 - RNA, 22 nt, Gallus gallus
cagugcaauaaugaaagggcgu

SEQ ID NO: 1094 - RNA, 22 nt, Gallus gallus
uugguccccuucaaccagcugu

SEQ ID NO: 1095 - RNA, 21 nt, Gallus gallus
uugguccccuucaaccagcua

SEQ ID NO: 1096 - RNA, 22 nt, Gallus gallus
uugguccccuucaaccagcugc

SEQ ID NO: 1097 - RNA, 23 nt, Gallus gallus
uauggcuuuuuauuccuauguga

SEQ ID NO: 1098 - RNA, 22 nt, Gallus gallus
uauugcuuaagaauacgcguag

SEQ ID NO: 1099 - RNA, 17 nt, Gallus gallus
agcugguguugugaauc

SEQ ID NO: 1100 - RNA, 21 nt, Gallus gallus
agugguuuuacccuaugguag

SEQ ID NO: 1101 - RNA, 21 nt, Gallus gallus
ccacaggguagaaccacggac

SEQ ID NO: 1102 - RNA, 22 nt, Gallus gallus
uguaguguuuccuacuuuaugg

SEQ ID NO: 1103 - RNA, 22 nt, Gallus gallus
cccauaaaguagaaagcacuac

SEQ ID NO: 1104 - RNA, 22 nt, Gallus gallus
cuacaguauagaugauguacuc

SEQ ID NO: 1105 - RNA, 22 nt, Gallus gallus
ugagaacugaauuccauggguu

SEQ ID NO: 1106 - RNA, 22 nt, Gallus gallus
ugagaacugaauuccauaggcg

SEQ ID NO: 1107 - RNA, 20 nt, Gallus gallus
cccuauggauucaguucugc

SEQ ID NO: 1108 - RNA, 20 nt, Gallus gallus
gugugcggaaaugcuucugc

SEQ ID NO: 1109 - RNA, 22 nt, Gallus gallus
ucagugcacuacagaacuuugu

SEQ ID NO: 1110 - RNA, 20 nt, Gallus gallus
uugcauagucacaaaaguga

SEQ ID NO: 1111 - RNA, 22 nt, Gallus gallus
uuaaugcuaaucgugauagggg

SEQ ID NO: 1112 - RNA, 21 nt, Gallus gallus
uagcagcacauaaugguuugu

SEQ ID NO: 1113 - RNA, 22 nt, Gallus gallus
uagcagcacaucaugguuugca

SEQ ID NO: 1114 - RNA, 22 nt, Gallus gallus
uagcagcacguaaauauuggug

SEQ ID NO: 1115 - RNA, 20 nt, Gallus gallus
acugcagugaaggcacuugu

SEQ ID NO: 1116 - RNA, 24 nt, Gallus gallus
caaagugcuuacagugcagguagu

SEQ ID NO: 1117 - RNA, 23 nt, Gallus gallus
aacauucaacgcugucggugagu

SEQ ID NO: 1118 - RNA, 22 nt, Gallus gallus
accaucgaccguugauuguacc

SEQ ID NO: 1119 - RNA, 22 nt, Gallus gallus
aacauucauugcugucgguggg

SEQ ID NO: 1120 - RNA, 23 nt, Gallus gallus
uauggcacugguagaauucacug

SEQ ID NO: 1121 - RNA, 22 nt, Gallus gallus
uggacggagaacugauaagggu

SEQ ID NO: 1122 - RNA, 20 nt, Gallus gallus
ucgugucuuguguugcagcc

SEQ ID NO: 1123 - RNA, 22 nt, Gallus gallus
uaaggugcaucuagugcagaua

SEQ ID NO: 1124 - RNA, 22 nt, Gallus gallus
uaaggugcaucuagugcaguua

SEQ ID NO: 1125 - RNA, 22 nt, Gallus gallus
ugauauguuugauauauuaggu

SEQ ID NO: 1126 - RNA, 24 nt, Gallus gallus
aacuggcccacaaagucccgcuuu

SEQ ID NO: 1127 - RNA, 22 nt, Gallus gallus
uguaacagcaacuccaugugga

SEQ ID NO: 1128 - RNA, 21 nt, Gallus gallus
uagguaguuucauguuguugg

SEQ ID NO: 1129 - RNA, 23 nt, Gallus gallus
cccaguguucagacuaccuguuc

SEQ ID NO: 1130 - RNA, 20 nt, Gallus gallus
uacaguagucugcacauugg

SEQ ID NO: 1131 - RNA, 23 nt, Gallus gallus
ugugcaaaucuaugcaaaacuga

SEQ ID NO: 1132 - RNA, 23 nt, Gallus gallus
ugugcaaauccaugcaaaacuga

SEQ ID NO: 1133 - RNA, 21 nt, Gallus gallus
uggaauguaaagaaguaugua

SEQ ID NO: 1134 - RNA, 21 nt, Gallus gallus
uggaauguuaagaaguaugua

SEQ ID NO: 1135 - RNA, 22 nt, Gallus gallus
uaacacugucugguaacgaugu

SEQ ID NO: 1136 - RNA, 23 nt, Gallus gallus
uaauacugccugguaaugaugau

SEQ ID NO: 1137 - RNA, 22 nt, Gallus gallus
agaggcauagagcaugggaaaa

SEQ ID NO: 1138 - RNA, 22 nt, Gallus gallus
uuuccuaugcauauacuucuuu

SEQ ID NO: 1139 - RNA, 22 nt, Gallus gallus
gugaaauguuuaggaccacuug

SEQ ID NO: 1140 - RNA, 22 nt, Gallus gallus
uucccuuugucauccuaugccu

SEQ ID NO: 1141 - RNA, 22 nt, Gallus gallus
uccuucauuccaccggagucug

SEQ ID NO: 1142 - RNA, 22 nt, Gallus gallus
cccuucauuccaccggaaucug

SEQ ID NO: 1143 - RNA, 22 nt, Gallus gallus
uggaauguaaggaagugugugg

SEQ ID NO: 1144 - RNA, 23 nt, Gallus gallus
uaaagugcuuauagugcagguag

SEQ ID NO: 1145 - RNA, 23 nt, Gallus gallus
caaagugcucauagugcagguag

SEQ ID NO: 1146 - RNA, 22 nt, Gallus gallus
uagcuuaucagacugauguuga

SEQ ID NO: 1147 - RNA, 22 nt, Gallus gallus
uucccuuugucauccuaugccu

SEQ ID NO: 1148 - RNA, 21 nt, Gallus gallus
augaccuaugaauugacagac

SEQ ID NO: 1149 - RNA, 21 nt, Gallus gallus
uaaucucagcuggcaacugug

SEQ ID NO: 1150 - RNA, 24 nt, Gallus gallus
uacugcaucaggaacugauuggau

SEQ ID NO: 1151 - RNA, 21 nt, Gallus gallus
uugugcuugaucuaaccaugu

SEQ ID NO: 1152 - RNA, 21 nt, Gallus gallus
ugauuguccaaacgcaauucu

SEQ ID NO: 1153 - RNA, 23 nt, Gallus gallus
agcuacauugucugcuggguuuc

SEQ ID NO: 1154 - RNA, 24 nt, Gallus gallus
agcuacaucuggcuacugggucuc

SEQ ID NO: 1155 - RNA, 24 nt, Gallus gallus
aacuacaucuggcuacugggucuc

SEQ ID NO: 1156 - RNA, 21 nt, Gallus gallus
ugucaguuugucaaauacccc

SEQ ID NO: 1157 - RNA, 21 nt, Gallus gallus
aucacauugccagggauuacc

SEQ ID NO: 1158 - RNA, 22 nt, Gallus gallus
uggcucaguucagcaggaacag

SEQ ID NO: 1159 - RNA, 21 nt, Gallus gallus
uucaaguaauccaggauaggc

SEQ ID NO: 1160 - RNA, 21 nt, Gallus gallus
uucacaguggcuaaguucugc

SEQ ID NO: 1161 - RNA, 21 nt, Gallus gallus
uagcaccauuugaaaucgguu

SEQ ID NO: 1162 - RNA, 23 nt, Gallus gallus
uagcaccauuugaaaucaguguu

SEQ ID NO: 1163 - RNA, 20 nt, Gallus gallus
uagcaccauuugaaaucggu

SEQ ID NO: 1164 - RNA, 25 nt, Gallus gallus
cagugcaauaauauugucaaagcau

SEQ ID NO: 1165 - RNA, 22 nt, Gallus gallus
aagugcuuccauguuuuaguga

SEQ ID NO: 1166 - RNA, 23 nt, Gallus gallus
uaagugcuuccauguuuuaguag

SEQ ID NO: 1167 - RNA, 23 nt, Gallus gallus
acuuuaacauggaggugcuuucu

SEQ ID NO: 1168 - RNA, 23 nt, Gallus gallus
uaagugcuuccauguuucagugg

SEQ ID NO: 1169 - RNA, 22 nt, Gallus gallus
uuuaacauggagguaccugcug

SEQ ID NO: 1170 - RNA, 23 nt, Gallus gallus
uaagugcuuccauguuuuaguug

SEQ ID NO: 1171 - RNA, 22 nt, Gallus gallus
cuuucagucggauguuugcagc

SEQ ID NO: 1172 - RNA, 22 nt, Gallus gallus
uguaaacauccucgacuggaag

SEQ ID NO: 1173 - RNA, 22 nt, Gallus gallus
uguaaacauccuacacucagcu

SEQ ID NO: 1174 - RNA, 24 nt, Gallus gallus
uguaaacauccuacacucucagcu

SEQ ID NO: 1175 - RNA, 22 nt, Gallus gallus
uguaaacauccccgacuggaag

SEQ ID NO: 1176 - RNA, 19 nt, Gallus gallus
uguaaacauccuugacugg

SEQ ID NO: 1177 - RNA, 22 nt, Gallus gallus
aggcaagauguuggcauagcug

SEQ ID NO: 1178 - RNA, 21 nt, Gallus gallus
uauugcacauuacuaaguugc

SEQ ID NO: 1179 - RNA, 19 nt, Gallus gallus
gugcauuguaguugcauug

SEQ ID NO: 1180 - RNA, 23 nt, Gallus gallus
uggcagugucuuagcugguuguu

SEQ ID NO: 1181 - RNA, 23 nt, Gallus gallus
caggcaguguaguuagcugauug

SEQ ID NO: 1182 - RNA, 23 nt, Gallus gallus
aggcaguguaguuagcugauugc

SEQ ID NO: 1183 - RNA, 22 nt, Gallus gallus
uaaugccccuaaaaauccuuau

SEQ ID NO: 1184 - RNA, 21 nt, Gallus gallus
aauugcacuuuagcaauggug

SEQ ID NO: 1185 - RNA, 22 nt, Gallus gallus
uuuguucguucggcucgcguua

SEQ ID NO: 1186 - RNA, 22 nt, Gallus gallus
agaucagaaggugauuguggcu

SEQ ID NO: 1187 - RNA, 22 nt, Gallus gallus
uaauacugucugguaaugccgu

SEQ ID NO: 1188 - RNA, 21 nt, Gallus gallus
uggcaguguauguuagcuggu

SEQ ID NO: 1189 - RNA, 23 nt, Gallus gallus
aaaccguuaccauuacugaguuu

SEQ ID NO: 1190 - RNA, 22 nt, Gallus gallus
uaugugcccuuggacuacaucg

SEQ ID NO: 1191 - RNA, 22 nt, Gallus gallus
caggcugguuagaugguuguca

SEQ ID NO: 1192 - RNA, 22 nt, Gallus gallus
ccugcauuguacacacugugug

SEQ ID NO: 1193 - RNA, 23 nt, Gallus gallus
auauauacacacacacauaagac

SEQ ID NO: 1194 - RNA, 23 nt, Gallus gallus
agugacaucauauguacggcugc

SEQ ID NO: 1195 - RNA, 22 nt, Gallus gallus
caaccuggaggacuccaugcug

SEQ ID NO: 1196 - RNA, 23 nt, Gallus gallus
uuaagacuuguagugauguuuag

SEQ ID NO: 1197 - RNA, 22 nt, Gallus gallus
uggaagacuagugauuuuguug

SEQ ID NO: 1198 - RNA, 21 nt, Gallus gallus
gcagagcugcagaugggauuc

SEQ ID NO: 1199 - RNA, 22 nt, Gallus gallus
uggaagacuagugauuuuuguu

SEQ ID NO: 1200 - RNA, 23 nt, Gallus gallus
ucuuugguuaucuagcuguauga

SEQ ID NO: 1201 - RNA, 21 nt, Gallus gallus
uaaagcuagagaaccgaaugu

SEQ ID NO: 1202 - RNA, 21 nt, Gallus gallus
uauugcacuugucccggccug

SEQ ID NO: 1203 - RNA, 22 nt, Gallus gallus
aacccguagauccgaucuugug

SEQ ID NO: 1204 - RNA, 22 nt, Gorilla gorilla
aacccguagauccgaacuugug

SEQ ID NO: 1205 - RNA, 22 nt, Gorilla gorilla
uacaguacugugauaacugaag

SEQ ID NO: 1206 - RNA, 23 nt, Gorilla gorilla
agcagcauuguacagggcuauga

SEQ ID NO: 1207 - RNA, 20 nt, Gorilla gorilla
ucaaaugcucagacuccugu

SEQ ID NO: 1208 - RNA, 24 nt, Gorilla gorilla
aaaagugcuuacagugcagguagc

SEQ ID NO: 1209 - RNA, 21 nt, Gorilla gorilla
uaaagugcugacagugcagau

SEQ ID NO: 1210 - RNA, 23 nt, Gorilla gorilla
agcagcauuguacagggcuauca

SEQ ID NO: 1211 - RNA, 23 nt, Gorilla gorilla
uacccuguagauccgaauuugug

SEQ ID NO: 1212 - RNA, 22 nt, Gorilla gorilla
uacccuguagaaccgaauuugu

SEQ ID NO: 1213 - RNA, 22 nt, Gorilla gorilla
uuaaggcacgcggugaaugcca

SEQ ID NO: 1214 - RNA, 22 nt, Gorilla gorilla
ucccugagacccuaacuuguga

SEQ ID NO: 1215 - RNA, 20 nt, Gorilla gorilla
cagugcaauguuaaaagggc

SEQ ID NO: 1216 - RNA, 22 nt, Gorilla gorilla
uugguccccuucaaccagcugu

SEQ ID NO: 1217 - RNA, 21 nt, Gorilla gorilla
ugugacugguugaccagaggg

SEQ ID NO: 1218 - RNA, 23 nt, Gorilla gorilla
uauggcuuuuuauuccuauguga

SEQ ID NO: 1219 - RNA, 23 nt, Gorilla gorilla
acuccauuuguuuugaugaugga

SEQ ID NO: 1220 - RNA, 21 nt, Gorilla gorilla
aacacugucugguaaagaugg

SEQ ID NO: 1221 - RNA, 22 nt, Gorilla gorilla
ugagaugaagcacuguagcuca

SEQ ID NO: 1222 - RNA, 24 nt, Gorilla gorilla
guccaguuuucccaggaaucccuu

SEQ ID NO: 1223 - RNA, 20 nt, Gorilla gorilla
uugcauagucacaaaaguga

SEQ ID NO: 1224 - RNA, 22 nt, Gorilla gorilla
uagguuauccguguugccuucg

SEQ ID NO: 1225 - RNA, 22 nt, Gorilla gorilla
uagcagcacauaaugguuugug

SEQ ID NO: 1226 - RNA, 22 nt, Gorilla gorilla
uagcagcacaucaugguuuaca

SEQ ID NO: 1227 - RNA, 22 nt, Gorilla gorilla
uagcagcacguaaauauuggcg

SEQ ID NO: 1228 - RNA, 20 nt, Gorilla gorilla
acugcagugaaggcacuugu

SEQ ID NO: 1229 - RNA, 24 nt, Gorilla gorilla
caaagugcuuacagugcagguagu

SEQ ID NO: 1230 - RNA, 22 nt, Gorilla gorilla
uaaggugcaucuagugcagaua

SEQ ID NO: 1231 - RNA, 23 nt, Gorilla gorilla
aacauucaacgcugucggugagu

SEQ ID NO: 1232 - RNA, 22 nt, Gorilla gorilla
accaucgaccguugauuguacc

SEQ ID NO: 1233 - RNA, 24 nt, Gorilla gorilla
aacauucauugcugucgguggguu

SEQ ID NO: 1234 - RNA, 22 nt, Gorilla gorilla
aacauucaaccugucggugagu

SEQ ID NO: 1235 - RNA, 23 nt, Gorilla gorilla
uauggcacugguagaauucacug

SEQ ID NO: 1236 - RNA, 23 nt, Gorilla gorilla
caaagaauucuccuuuugggcuu

SEQ ID NO: 1237 - RNA, 21 nt, Gorilla gorilla
ucgugucuuguguugcagccg

SEQ ID NO: 1238 - RNA, 22 nt, Gorilla gorilla
ugauauguuugauauauuaggu

SEQ ID NO: 1239 - RNA, 22 nt, Gorilla gorilla
uguaacagcaacuccaugugga

SEQ ID NO: 1240 - RNA, 21 nt, Gorilla gorilla
uagcagcacagaaauauuggc

SEQ ID NO: 1241 - RNA, 21 nt, Gorilla gorilla
uagguaguuucauguuguugg

SEQ ID NO: 1242 - RNA, 19 nt, Gorilla gorilla
gguccagaggggagauagg

SEQ ID NO: 1243 - RNA, 23 nt, Gorilla gorilla
cccaguguucagacuaccuguuc

SEQ ID NO: 1244 - RNA, 23 nt, Gorilla gorilla
ugugcaaaucuaugcaaaacuga

SEQ ID NO: 1245 - RNA, 23 nt, Gorilla gorilla
ugugcaaauccaugcaaaacuga

SEQ ID NO: 1246 - RNA, 22 nt, Gorilla gorilla
uaaagugcuuauagugcaggua

SEQ ID NO: 1247 - RNA, 22 nt, Gorilla gorilla
aauacugccggguaaugaugga

SEQ ID NO: 1248 - RNA, 22 nt, Gorilla gorilla
uucccuuugucauccuaugccu

SEQ ID NO: 1249 - RNA, 22 nt, Gorilla gorilla
uccuucauuccaccggagucug

SEQ ID NO: 1250 - RNA, 22 nt, Gorilla gorilla
uagcuuaucagacugauguuga

SEQ ID NO: 1251 - RNA, 21 nt, Gorilla gorilla
acagcaggcacagacaggcag

SEQ ID NO: 1252 - RNA, 21 nt, Gorilla gorilla
augaccuaugaauugacagac

SEQ ID NO: 1253 - RNA, 21 nt, Gorilla gorilla
uaaucucagcuggcaacugug

SEQ ID NO: 1254 - RNA, 24 nt, Gorilla gorilla
uacugcaucaggaacugauuggau

SEQ ID NO: 1255 - RNA, 21 nt, Gorilla gorilla
uugugcuugaucuaaccaugu

SEQ ID NO: 1256 - RNA, 21 nt, Gorilla gorilla
ugauuguccaaacgcaauucu

SEQ ID NO: 1257 - RNA, 21 nt, Gorilla gorilla
ccacaccgugucugacacuuu

SEQ ID NO: 1258 - RNA, 23 nt, Gorilla gorilla
agcuacauugucugcuggguuuc

SEQ ID NO: 1259 - RNA, 21 nt, Gorilla gorilla
ugucaguuugucaaauacccc

SEQ ID NO: 1260 - RNA, 23 nt, Gorilla gorilla
caagucacuagugguuccguuua

SEQ ID NO: 1261 - RNA, 21 nt, Gorilla gorilla
aucacauugccagggauuucc

SEQ ID NO: 1262 - RNA, 22 nt, Gorilla gorilla
uggcucaguucagcaggaacag

SEQ ID NO: 1263 - RNA, 22 nt, Gorilla gorilla
cauugcacuugucucggucuga

SEQ ID NO: 1264 - RNA, 22 nt, Gorilla gorilla
uucaaguaauccaggauaggcu

SEQ ID NO: 1265 - RNA, 22 nt, Gorilla gorilla
uucacaguggcuaaguuccgcc

SEQ ID NO: 1266 - RNA, 22 nt, Gorilla gorilla
aaggagcucacagucuauugag

SEQ ID NO: 1267 - RNA, 22 nt, Gorilla gorilla
cuagcaccaucugaaaucgguu

SEQ ID NO: 1268 - RNA, 20 nt, Gorilla gorilla
uagcaccauuugaaaucagu

SEQ ID NO: 1269 - RNA, 22 nt, Gorilla gorilla
cuuucagucggauguuugcagc

SEQ ID NO: 1270 - RNA, 22 nt, Gorilla gorilla
uguaaacauccucgacuggaag

SEQ ID NO: 1271 - RNA, 21 nt, Gorilla gorilla
uguaaacauccuacacucagc

SEQ ID NO: 1272 - RNA, 22 nt, Gorilla gorilla
uguaaacauccccgacuggaag

SEQ ID NO: 1273 - RNA, 21 nt, Gorilla gorilla
ggcaagaugcuggcauagcug

SEQ ID NO: 1274 - RNA, 21 nt, Gorilla gorilla
uauugcacauuacuaaguugc

SEQ ID NO: 1275 - RNA, 19 nt, Gorilla gorilla
gugcauuguaguugcauug

SEQ ID NO: 1276 - RNA, 22 nt, Gorilla gorilla
uggcagugucuuagcugguugu

SEQ ID NO: 1277 - RNA, 21 nt, Gorilla gorilla
uggaagacuagugauuuuguu

SEQ ID NO: 1278 - RNA, 23 nt, Gorilla gorilla
ucuuugguuaucuagcuguauga

SEQ ID NO: 1279 - RNA, 22 nt, Gorilla gorilla
uauugcacuugucccggccugu

SEQ ID NO: 1280 - RNA, 22 nt, Gorilla gorilla
aaagugcuguucgugcagguag

SEQ ID NO: 1281 - RNA, 22 nt, Gorilla gorilla
uucaacggguauuuauugagca

SEQ ID NO: 1282 - RNA, 22 nt, Gorilla gorilla
uuuggcacuagcacauuuuugc

SEQ ID NO: 1283 - RNA, 22 nt, Gorilla gorilla
ugagguaguaaguuguauuguu

SEQ ID NO: 1284 - RNA, 22 nt, Gorilla gorilla
aacccguagauccgaucuugug

SEQ ID NO: 1285 - RNA, 20 nt, Glycine max
ugacagaagagagugagcac

SEQ ID NO: 1286 - RNA, 21 nt, Glycine max
ugacagaagagagagagcaca

SEQ ID NO: 1287 - RNA, 21 nt, Glycine max
uugacagaagauagagagcac

SEQ ID NO: 1288 - RNA, 21 nt, Glycine max
uugacagaagauagagagcac

SEQ ID NO: 1289 - RNA, 21 nt, Glycine max
uugacagaagauagagagcac

SEQ ID NO: 1290 - RNA, 21 nt, Glycine max
uuuggauugaagggagcucua

SEQ ID NO: 1291 - RNA, 21 nt, Glycine max
ugccuggcucccuguaugcca

SEQ ID NO: 1292 - RNA, 21 nt, Glycine max
ucggaccaggcuucauucccc

SEQ ID NO: 1293 - RNA, 21 nt, Glycine max
ucggaccaggcuucauucccc

SEQ ID NO: 1294 - RNA, 21 nt, Glycine max
ugaagcugccagcaugaucua

SEQ ID NO: 1295 - RNA, 21 nt, Glycine max
ugaagcugccagcaugaucua

SEQ ID NO: 1296 - RNA, 21 nt, Glycine max
ucgcuuggugcaggucgggaa

SEQ ID NO: 1297 - RNA, 21 nt, Glycine max
cagccaaggaugacuugccgg

SEQ ID NO: 1298 - RNA, 21 nt, Glycine max
agaaucuugaugaugcugcau

SEQ ID NO: 1299 - RNA, 21 nt, Glycine max
agaaucuugaugaugcugcau

SEQ ID NO: 1300 - RNA, 20 nt, Glycine max
uuggacugaagggagcuccc

SEQ ID NO: 1301 - RNA, 20 nt, Glycine max
uuggacugaagggagcuccc

SEQ ID NO: 1302 - RNA, 20 nt, Glycine max
uuggacugaaaggagcuccu

SEQ ID NO: 1303 - RNA, 21 nt, Glycine max
uuccacagcuuucuugaacug

SEQ ID NO: 1304 - RNA, 21 nt, Glycine max
uuccacagcuuucuugaacuu

SEQ ID NO: 1305 - RNA, 21 nt, Glycine max
uguguucucaggucaccccuu

SEQ ID NO: 1306 - RNA, 21 nt, Glycine max
uguguucucaggucaccccuu

SEQ ID NO: 1307 - RNA, 22 nt, Human cytomegalovirus
aagugacggugagauccaggcu

SEQ ID NO: 1308 - RNA, 21 nt, Human cytomegalovirus
ucguccuccccuucuucaccg

SEQ ID NO: 1309 - RNA, 20 nt, Human cytomegalovirus
uaacuagccuucccgugaga

SEQ ID NO: 1310 - RNA, 22 nt, Human cytomegalovirus
ucaccagaaugcuaguuuguag

SEQ ID NO: 1311 - RNA, 22 nt, Human cytomegalovirus
ucguugaagacaccuggaaaga

SEQ ID NO: 1312 - RNA, 20 nt, Human cytomegalovirus
ggggaugggcuggcgcgcgg

SEQ ID NO: 1313 - RNA, 21 nt, Human cytomegalovirus
ugcgucucggccucguccaga

SEQ ID NO: 1314 - RNA, 21 nt, Human cytomegalovirus
aaccgcucaguggcucggacc

SEQ ID NO: 1315 - RNA, 23 nt, Human cytomegalovirus
auccacuuggagagcucccgcgg

SEQ ID NO: 1316 - RNA, 22 nt, Human cytomegalovirus
agcggucuguucagguggauga

SEQ ID NO: 1317 - RNA, 22 nt, Human cytomegalovirus
gauugugcccggaccgugggcg

SEQ ID NO: 1318 - RNA, 22 nt, Human cytomegalovirus
cgacauggacgugcagggggau

SEQ ID NO: 1319 - RNA, 21 nt, Human cytomegalovirus
ugacaagccugacgagagcgu

SEQ ID NO: 1320 - RNA, 22 nt, Human cytomegalovirus
uuaugauaggugugacgauguc

SEQ ID NO: 1321 - RNA, 22 nt, Homo sapiens
ugagguaguagguuguauaguu

SEQ ID NO: 1322 - RNA, 22 nt, Homo sapiens
ugagguaguagguugugugguu

SEQ ID NO: 1323 - RNA, 22 nt, Homo sapiens
ugagguaguagguuguaugguu

SEQ ID NO: 1324 - RNA, 21 nt, Homo sapiens
agagguaguagguugcauagu

SEQ ID NO: 1325 - RNA, 21 nt, Homo sapiens
ugagguaggagguuguauagu

SEQ ID NO: 1326 - RNA, 22 nt, Homo sapiens
ugagguaguagauuguauaguu

SEQ ID NO: 1327 - RNA, 21 nt, Homo sapiens
ugagguaguaguuuguacagu

SEQ ID NO: 1328 - RNA, 21 nt, Homo sapiens
ugagguaguaguuugugcugu

SEQ ID NO: 1329 - RNA, 21 nt, Homo sapiens
uggaauguaaagaaguaugua

SEQ ID NO: 1330 - RNA, 22 nt, Homo sapiens
aacccguagauccgaacuugug

SEQ ID NO: 1331 - RNA, 22 nt, Homo sapiens
uacaguacugugauaacugaag

SEQ ID NO: 1332 - RNA, 23 nt, Homo sapiens
agcagcauuguacagggcuauga

SEQ ID NO: 1333 - RNA, 20 nt, Homo sapiens
ucaaaugcucagacuccugu

SEQ ID NO: 1334 - RNA, 24 nt, Homo sapiens
aaaagugcuuacagugcagguagc

SEQ ID NO: 1335 - RNA, 21 nt, Homo sapiens
uaaagugcugacagugcagau

SEQ ID NO: 1336 - RNA, 23 nt, Homo sapiens
agcagcauuguacagggcuauca

SEQ ID NO: 1337 - RNA, 23 nt, Homo sapiens
uacccuguagauccgaauuugug

SEQ ID NO: 1338 - RNA, 22 nt, Homo sapiens
uacccuguagaaccgaauuugu

SEQ ID NO: 1339 - RNA, 23 nt, Homo sapiens
uggagugugacaaugguguuugu

SEQ ID NO: 1340 - RNA, 22 nt, Homo sapiens
uuaaggcacgcggugaaugcca

SEQ ID NO: 1341 - RNA, 23 nt, Homo sapiens
ucccugagacccuuuaaccugug

SEQ ID NO: 1342 - RNA, 22 nt, Homo sapiens
ucccugagacccuaacuuguga

SEQ ID NO: 1343 - RNA, 21 nt, Homo sapiens
ucguaccgugaguaauaaugc

SEQ ID NO: 1344 - RNA, 21 nt, Homo sapiens
cauuauuacuuuugguacgcg

SEQ ID NO: 1345 - RNA, 22 nt, Homo sapiens
ucggauccgucugagcuuggcu

SEQ ID NO: 1346 - RNA, 22 nt, Homo sapiens
ucacagugaaccggucucuuuu

SEQ ID NO: 1347 - RNA, 22 nt, Homo sapiens
ucacagugaaccggucucuuuc

SEQ ID NO: 1348 - RNA, 21 nt, Homo sapiens
cuuuuugcggucugggcuugc

SEQ ID NO: 1349 - RNA, 22 nt, Homo sapiens
cagugcaauguuaaaagggcau

SEQ ID NO: 1350 - RNA, 22 nt, Homo sapiens
cagugcaaugaugaaagggcau

SEQ ID NO: 1351 - RNA, 22 nt, Homo sapiens
uaacagucuacagccauggucg

SEQ ID NO: 1352 - RNA, 22 nt, Homo sapiens
uugguccccuucaaccagcugu

SEQ ID NO: 1353 - RNA, 21 nt, Homo sapiens
uugguccccuucaaccagcua

SEQ ID NO: 1354 - RNA, 21 nt, Homo sapiens
ugugacugguugaccagaggg

SEQ ID NO: 1355 - RNA, 23 nt, Homo sapiens
uauggcuuuuuauuccuauguga

SEQ ID NO: 1356 - RNA, 22 nt, Homo sapiens
uauggcuuuucauuccuaugug

SEQ ID NO: 1357 - RNA, 23 nt, Homo sapiens
acuccauuuguuuugaugaugga

SEQ ID NO: 1358 - RNA, 22 nt, Homo sapiens
uauugcuuaagaauacgcguag

SEQ ID NO: 1359 - RNA, 17 nt, Homo sapiens
agcugguguugugaauc

SEQ ID NO: 1360 - RNA, 18 nt, Homo sapiens
ucuacagugcacgugucu

SEQ ID NO: 1361 - RNA, 21 nt, Homo sapiens
agugguuuuacccuaugguag

SEQ ID NO: 1362 - RNA, 22 nt, Homo sapiens
uaacacugucugguaaagaugg

SEQ ID NO: 1363 - RNA, 23 nt, Homo sapiens
uguaguguuuccuacuuuaugga

SEQ ID NO: 1364 - RNA, 20 nt, Homo sapiens
cauaaaguagaaagcacuac

SEQ ID NO: 1365 - RNA, 22 nt, Homo sapiens
ugagaugaagcacuguagcuca

SEQ ID NO: 1366 - RNA, 22 nt, Homo sapiens
uacaguauagaugauguacuag

SEQ ID NO: 1367 - RNA, 24 nt, Homo sapiens
guccaguuuucccaggaaucccuu

SEQ ID NO: 1368 - RNA, 22 nt, Homo sapiens
ugagaacugaauuccauggguu

SEQ ID NO: 1369 - RNA, 22 nt, Homo sapiens
ugagaacugaauuccauaggcu

SEQ ID NO: 1370 - RNA, 20 nt, Homo sapiens
guguguggaaaugcuucugc

SEQ ID NO: 1371 - RNA, 22 nt, Homo sapiens
ucagugcacuacagaacuuugu

SEQ ID NO: 1372 - RNA, 22 nt, Homo sapiens
ucagugcaucacagaacuuugu

SEQ ID NO: 1373 - RNA, 22 nt, Homo sapiens
ucuggcuccgugucuucacucc

SEQ ID NO: 1374 - RNA, 22 nt, Homo sapiens
ucucccaacccuuguaccagug

SEQ ID NO: 1375 - RNA, 22 nt, Homo sapiens
acuagacugaagcuccuugagg

SEQ ID NO: 1376 - RNA, 22 nt, Homo sapiens
ucagugcaugacagaacuuggg

SEQ ID NO: 1377 - RNA, 20 nt, Homo sapiens
uugcauagucacaaaaguga

SEQ ID NO: 1378 - RNA, 22 nt, Homo sapiens
uagguuauccguguugccuucg

SEQ ID NO: 1379 - RNA, 22 nt, Homo sapiens
aaucauacacgguugaccuauu

SEQ ID NO: 1380 - RNA, 22 nt, Homo sapiens
uuaaugcuaaucgugauagggg

SEQ ID NO: 1381 - RNA, 22 nt, Homo sapiens
uagcagcacauaaugguuugug

SEQ ID NO: 1382 - RNA, 22 nt, Homo sapiens
uagcagcacaucaugguuuaca

SEQ ID NO: 1383 - RNA, 22 nt, Homo sapiens
uagcagcacguaaauauuggcg

SEQ ID NO: 1384 - RNA, 20 nt, Homo sapiens
acugcagugaaggcacuugu

SEQ ID NO: 1385 - RNA, 24 nt, Homo sapiens
caaagugcuuacagugcagguagu

SEQ ID NO: 1386 - RNA, 23 nt, Homo sapiens
aacauucaacgcugucggugagu

SEQ ID NO: 1387 - RNA, 22 nt, Homo sapiens
accaucgaccguugauuguacc

SEQ ID NO: 1388 - RNA, 22 nt, Homo sapiens
aacauucauugcugucgguggg

SEQ ID NO: 1389 - RNA, 22 nt, Homo sapiens
aacauucaaccugucggugagu

SEQ ID NO: 1390 - RNA, 24 nt, Homo sapiens
aacauucauuguugucgguggguu

SEQ ID NO: 1391 - RNA, 22 nt, Homo sapiens
uuuggcaaugguagaacucaca

SEQ ID NO: 1392 - RNA, 21 nt, Homo sapiens
ugguucuagacuugccaacua

SEQ ID NO: 1393 - RNA, 23 nt, Homo sapiens
uauggcacugguagaauucacug

SEQ ID NO: 1394 - RNA, 22 nt, Homo sapiens
uggacggagaacugauaagggu

SEQ ID NO: 1395 - RNA, 18 nt, Homo sapiens
uggagagaaaggcaguuc

SEQ ID NO: 1396 - RNA, 23 nt, Homo sapiens
caaagaauucuccuuuugggcuu

SEQ ID NO: 1397 - RNA, 21 nt, Homo sapiens
ucgugucuuguguugcagccg

SEQ ID NO: 1398 - RNA, 22 nt, Homo sapiens
caucccuugcaugguggagggu

SEQ ID NO: 1399 - RNA, 23 nt, Homo sapiens
gugccuacugagcugauaucagu

SEQ ID NO: 1400 - RNA, 22 nt, Homo sapiens
uaaggugcaucuagugcagaua

SEQ ID NO: 1401 - RNA, 21 nt, Homo sapiens
acugcccuaagugcuccuucu

SEQ ID NO: 1402 - RNA, 22 nt, Homo sapiens
uaaggugcaucuagugcaguua

SEQ ID NO: 1403 - RNA, 22 nt, Homo sapiens
ugauauguuugauauauuaggu

SEQ ID NO: 1404 - RNA, 22 nt, Homo sapiens
caacggaaucccaaaagcagcu

SEQ ID NO: 1405 - RNA, 22 nt, Homo sapiens
gcugcgcuuggauuucgucccc

SEQ ID NO: 1406 - RNA, 21 nt, Homo sapiens
cugaccuaugaauugacagcc

SEQ ID NO: 1407 - RNA, 21 nt, Homo sapiens
aacuggccuacaaagucccag

SEQ ID NO: 1408 - RNA, 24 nt, Homo sapiens
aacuggcccucaaagucccgcuuu

SEQ ID NO: 1409 - RNA, 22 nt, Homo sapiens
uguaacagcaacuccaugugga

SEQ ID NO: 1410 - RNA, 21 nt, Homo sapiens
uagcagcacagaaauauuggc

SEQ ID NO: 1411 - RNA, 21 nt, Homo sapiens
uagguaguuucauguuguugg

SEQ ID NO: 1412 - RNA, 21 nt, Homo sapiens
uagguaguuuccuguuguugg

SEQ ID NO: 1413 - RNA, 22 nt, Homo sapiens
uucaccaccuucuccacccagc

SEQ ID NO: 1414 - RNA, 19 nt, Homo sapiens
gguccagaggggagauagg

SEQ ID NO: 1415 - RNA, 23 nt, Homo sapiens
cccaguguucagacuaccuguuc

SEQ ID NO: 1416 - RNA, 22 nt, Homo sapiens
uacaguagucugcacauugguu

SEQ ID NO: 1417 - RNA, 23 nt, Homo sapiens
cccaguguuuagacuaucuguuc

SEQ ID NO: 1418 - RNA, 23 nt, Homo sapiens
ugugcaaaucuaugcaaaacuga

SEQ ID NO: 1419 - RNA, 23 nt, Homo sapiens
ugugcaaauccaugcaaaacuga

SEQ ID NO: 1420 - RNA, 22 nt, Homo sapiens
uaacacugucugguaacgaugu

SEQ ID NO: 1421 - RNA, 22 nt, Homo sapiens
caucuuaccggacagugcugga

SEQ ID NO: 1422 - RNA, 23 nt, Homo sapiens
uaauacugccugguaaugaugac

SEQ ID NO: 1423 - RNA, 22 nt, Homo sapiens
uaauacugccggguaaugaugg

SEQ ID NO: 1424 - RNA, 22 nt, Homo sapiens
agagguauagggcaugggaaaa

SEQ ID NO: 1425 - RNA, 22 nt, Homo sapiens
uuuccuaugcauauacuucuuu

SEQ ID NO: 1426 - RNA, 22 nt, Homo sapiens
gugaaauguuuaggaccacuag

SEQ ID NO: 1427 - RNA, 22 nt, Homo sapiens
uucccuuugucauccuaugccu

SEQ ID NO: 1428 - RNA, 22 nt, Homo sapiens
uccuucauuccaccggagucug

SEQ ID NO: 1429 - RNA, 22 nt, Homo sapiens
uggaauguaaggaagugugugg

SEQ ID NO: 1430 - RNA, 22 nt, Homo sapiens
auaagacgagcaaaaagcuugu

SEQ ID NO: 1431 - RNA, 23 nt, Homo sapiens
uaaagugcuuauagugcagguag

SEQ ID NO: 1432 - RNA, 23 nt, Homo sapiens
caaagugcucauagugcagguag

SEQ ID NO: 1433 - RNA, 22 nt, Homo sapiens
uagcuuaucagacugauguuga

SEQ ID NO: 1434 - RNA, 22 nt, Homo sapiens
cugugcgugugacagcggcuga

SEQ ID NO: 1435 - RNA, 22 nt, Homo sapiens
uucccuuugucauccuucgccu

SEQ ID NO: 1436 - RNA, 21 nt, Homo sapiens
uaacagucuccagucacggcc

SEQ ID NO: 1437 - RNA, 21 nt, Homo sapiens
acagcaggcacagacaggcag

SEQ ID NO: 1438 - RNA, 21 nt, Homo sapiens
augaccuaugaauugacagac

SEQ ID NO: 1439 - RNA, 21 nt, Homo sapiens
uaaucucagcuggcaacugug

SEQ ID NO: 1440 - RNA, 24 nt, Homo sapiens
uacugcaucaggaacugauuggau

SEQ ID NO: 1441 - RNA, 21 nt, Homo sapiens
uugugcuugaucuaaccaugu

SEQ ID NO: 1442 - RNA, 21 nt, Homo sapiens
ugauuguccaaacgcaauucu

SEQ ID NO: 1443 - RNA, 22 nt, Homo sapiens
aagcugccaguugaagaacugu

SEQ ID NO: 1444 - RNA, 21 nt, Homo sapiens
ccacaccguaucugacacuuu

SEQ ID NO: 1445 - RNA, 23 nt, Homo sapiens
agcuacauugucugcuggguuuc

SEQ ID NO: 1446 - RNA, 24 nt, Homo sapiens
agcuacaucuggcuacugggucuc

SEQ ID NO: 1447 - RNA, 21 nt, Homo sapiens
ugucaguuugucaaauacccc

SEQ ID NO: 1448 - RNA, 23 nt, Homo sapiens
caagucacuagugguuccguuua

SEQ ID NO: 1449 - RNA, 21 nt, Homo sapiens
aucacauugccagggauuucc

SEQ ID NO: 1450 - RNA, 21 nt, Homo sapiens
aucacauugccagggauuacc

SEQ ID NO: 1451 - RNA, 22 nt, Homo sapiens
uggcucaguucagcaggaacag

SEQ ID NO: 1452 - RNA, 22 nt, Homo sapiens
cauugcacuugucucggucuga

SEQ ID NO: 1453 - RNA, 21 nt, Homo sapiens
uucaaguaauccaggauaggc

SEQ ID NO: 1454 - RNA, 22 nt, Homo sapiens
uucaaguaauucaggauagguu

SEQ ID NO: 1455 - RNA, 21 nt, Homo sapiens
uucacaguggcuaaguuccgc

SEQ ID NO: 1456 - RNA, 21 nt, Homo sapiens
uucacaguggcuaaguucugc

SEQ ID NO: 1457 - RNA, 22 nt, Homo sapiens
aaggagcucacagucuauugag

SEQ ID NO: 1458 - RNA, 21 nt, Homo sapiens
agggcccccccucaauccugu

SEQ ID NO: 1459 - RNA, 22 nt, Homo sapiens
uaugugggaugguaaaccgcuu

SEQ ID NO: 1460 - RNA, 22 nt, Homo sapiens
ugguuuaccgucccacauacau

SEQ ID NO: 1461 - RNA, 21 nt, Homo sapiens
uagcaccaucugaaaucgguu

SEQ ID NO: 1462 - RNA, 23 nt, Homo sapiens
uagcaccauuugaaaucaguguu

SEQ ID NO: 1463 - RNA, 20 nt, Homo sapiens
uagcaccauuugaaaucggu

SEQ ID NO: 1464 - RNA, 23 nt, Homo sapiens
cagugcaauaguauugucaaagc

SEQ ID NO: 1465 - RNA, 23 nt, Homo sapiens
uaagugcuuccauguuuugguga

SEQ ID NO: 1466 - RNA, 22 nt, Homo sapiens
uaaacguggauguacuugcuuu

SEQ ID NO: 1467 - RNA, 23 nt, Homo sapiens
uaagugcuuccauguuuuaguag

SEQ ID NO: 1468 - RNA, 23 nt, Homo sapiens
acuuuaacauggaagugcuuucu

SEQ ID NO: 1469 - RNA, 23 nt, Homo sapiens
uaagugcuuccauguuucagugg

SEQ ID NO: 1470 - RNA, 22 nt, Homo sapiens
uuuaacauggggguaccugcug

SEQ ID NO: 1471 - RNA, 23 nt, Homo sapiens
uaagugcuuccauguuugagugu

SEQ ID NO: 1472 - RNA, 22 nt, Homo sapiens
cuuucagucggauguuugcagc

SEQ ID NO: 1473 - RNA, 22 nt, Homo sapiens
uguaaacauccucgacuggaag

SEQ ID NO: 1474 - RNA, 22 nt, Homo sapiens
uguaaacauccuacacucagcu

SEQ ID NO: 1475 - RNA, 23 nt, Homo sapiens
uguaaacauccuacacucucagc

SEQ ID NO: 1476 - RNA, 22 nt, Homo sapiens
uguaaacauccccgacuggaag

SEQ ID NO: 1477 - RNA, 22 nt, Homo sapiens
cuuucagucggauguuuacagc

SEQ ID NO: 1478 - RNA, 20 nt, Homo sapiens
uguaaacauccuugacugga

SEQ ID NO: 1479 - RNA, 21 nt, Homo sapiens
ggcaagaugcuggcauagcug

SEQ ID NO: 1480 - RNA, 21 nt, Homo sapiens
uauugcacauuacuaaguugc

SEQ ID NO: 1481 - RNA, 23 nt, Homo sapiens
aaaagcuggguugagagggcgaa

SEQ ID NO: 1482 - RNA, 22 nt, Homo sapiens
gcacauuacacggucgaccucu

SEQ ID NO: 1483 - RNA, 22 nt, Homo sapiens
ccacugccccaggugcugcugg

SEQ ID NO: 1484 - RNA, 23 nt, Homo sapiens
cgcauccccuagggcauuggugu

SEQ ID NO: 1485 - RNA, 23 nt, Homo sapiens
ccuaguagguguccaguaagugu

SEQ ID NO: 1486 - RNA, 20 nt, Homo sapiens
ccucugggcccuuccuccag

SEQ ID NO: 1487 - RNA, 22 nt, Homo sapiens
cuggcccucucugcccuuccgu

SEQ ID NO: 1488 - RNA, 22 nt, Homo sapiens
aacacaccugguuaaccucuuu

SEQ ID NO: 1489 - RNA, 19 nt, Homo sapiens
gugcauuguaguugcauug

SEQ ID NO: 1490 - RNA, 23 nt, Homo sapiens
gcaaagcacacggccugcagaga

SEQ ID NO: 1491 - RNA, 21 nt, Homo sapiens
gccccugggccuauccuagaa

SEQ ID NO: 1492 - RNA, 23 nt, Homo sapiens
ucaagagcaauaacgaaaaaugu

SEQ ID NO: 1493 - RNA, 23 nt, Homo sapiens
uccagcuccuauaugaugccuuu

SEQ ID NO: 1494 - RNA, 23 nt, Homo sapiens
uccagcaucagugauuuuguuga

SEQ ID NO: 1495 - RNA, 21 nt, Homo sapiens
ucccuguccuccaggagcuca

SEQ ID NO: 1496 - RNA, 21 nt, Homo sapiens
gugcauugcuguugcauugca

SEQ ID NO: 1497 - RNA, 23 nt, Homo sapiens
uccgucucaguuacuuuauagcc

SEQ ID NO: 1498 - RNA, 24 nt, Homo sapiens
ucucacacagaaaucgcacccguc

SEQ ID NO: 1499 - RNA, 21 nt, Homo sapiens
ugcugacuccuaguccagggc

SEQ ID NO: 1500 - RNA, 23 nt, Homo sapiens
ugucugcccgcaugccugccucu

SEQ ID NO: 1501 - RNA, 23 nt, Homo sapiens
uggcagugucuuagcugguuguu

SEQ ID NO: 1502 - RNA, 23 nt, Homo sapiens
uaggcagugucauuagcugauug

SEQ ID NO: 1503 - RNA, 23 nt, Homo sapiens
aggcaguguaguuagcugauugc

SEQ ID NO: 1504 - RNA, 22 nt, Homo sapiens
uuaucagaaucuccagggguac

SEQ ID NO: 1505 - RNA, 24 nt, Homo sapiens
aauccuuggaaccuaggugugagu

SEQ ID NO: 1506 - RNA, 22 nt, Homo sapiens
aauugcacgguauccaucugua

SEQ ID NO: 1507 - RNA, 22 nt, Homo sapiens
cggguggaucacgaugcaauuu

SEQ ID NO: 1508 - RNA, 22 nt, Homo sapiens
uaaugccccuaaaaauccuuau

SEQ ID NO: 1509 - RNA, 22 nt, Homo sapiens
aauugcacuuuagcaaugguga

SEQ ID NO: 1510 - RNA, 22 nt, Homo sapiens
acauagaggaaauuccacguuu

SEQ ID NO: 1511 - RNA, 21 nt, Homo sapiens
aauaauacaugguugaucuuu

SEQ ID NO: 1512 - RNA, 22 nt, Homo sapiens
agaucgaccguguuauauucgc

SEQ ID NO: 1513 - RNA, 21 nt, Homo sapiens
gccugcugggguggaaccugg

SEQ ID NO: 1514 - RNA, 21 nt, Homo sapiens
gugccgccaucuuuugagugu

SEQ ID NO: 1515 - RNA, 23 nt, Homo sapiens
aaagugcugcgacauuugagcgu

SEQ ID NO: 1516 - RNA, 23 nt, Homo sapiens
gaagugcuucgauuuuggggugu

SEQ ID NO: 1517 - RNA, 22 nt, Homo sapiens
acucaaaaugggggcgcuuucc

SEQ ID NO: 1518 - RNA, 22 nt, Homo sapiens
uuauaauacaaccugauaagug

SEQ ID NO: 1519 - RNA, 22 nt, Homo sapiens
uuuguucguucggcucgcguga

SEQ ID NO: 1520 - RNA, 21 nt, Homo sapiens
aucauagaggaaaauccacgu

SEQ ID NO: 1521 - RNA, 21 nt, Homo sapiens
gguagauucuccuucuaugag

SEQ ID NO: 1522 - RNA, 22 nt, Homo sapiens
aucauagaggaaaauccauguu

SEQ ID NO: 1523 - RNA, 22 nt, Homo sapiens
aucacacaaaggcaacuuuugu

SEQ ID NO: 1524 - RNA, 22 nt, Homo sapiens
cuccugacuccagguccugugu

SEQ ID NO: 1525 - RNA, 19 nt, Homo sapiens
ugguagacuauggaacgua

SEQ ID NO: 1526 - RNA, 22 nt, Homo sapiens
uauguaauaugguccacaucuu

SEQ ID NO: 1527 - RNA, 22 nt, Homo sapiens
ugguugaccauagaacaugcgc

SEQ ID NO: 1528 - RNA, 22 nt, Homo sapiens
uauacaagggcaagcucucugu

SEQ ID NO: 1529 - RNA, 22 nt, Homo sapiens
gaaguuguucgugguggauucg

SEQ ID NO: 1530 - RNA, 22 nt, Homo sapiens
agaucagaaggugauuguggcu

SEQ ID NO: 1531 - RNA, 20 nt, Homo sapiens
auuccuagaaauuguucaua

SEQ ID NO: 1532 - RNA, 23 nt, Homo sapiens
cgaauguugcucggugaaccccu

SEQ ID NO: 1533 - RNA, 22 nt, Homo sapiens
agguuacccgagcaacuuugca

SEQ ID NO: 1534 - RNA, 21 nt, Homo sapiens
aauauaacacagauggccugu

SEQ ID NO: 1535 - RNA, 21 nt, Homo sapiens
uaguagaccguauagcguacg

SEQ ID NO: 1536 - RNA, 23 nt, Homo sapiens
acuucaccugguccacuagccgu

SEQ ID NO: 1537 - RNA, 23 nt, Homo sapiens
aucaacagacauuaauugggcgc

SEQ ID NO: 1538 - RNA, 22 nt, Homo sapiens
cuggacuuagggucagaaggcc

SEQ ID NO: 1539 - RNA, 22 nt, Homo sapiens
cuggacuuggagucagaaggcc

SEQ ID NO: 1540 - RNA, 22 nt, Homo sapiens
agcucggucugaggccccucag

SEQ ID NO: 1541 - RNA, 22 nt, Homo sapiens
cagcagcaauucauguuuugaa

SEQ ID NO: 1542 - RNA, 21 nt, Homo sapiens
aucgggaaugucguguccgcc

SEQ ID NO: 1543 - RNA, 23 nt, Homo sapiens
aaugacacgaucacucccguuga

SEQ ID NO: 1544 - RNA, 22 nt, Homo sapiens
uaauacugucugguaaaaccgu

SEQ ID NO: 1545 - RNA, 21 nt, Homo sapiens
ugucuugcaggccgucaugca

SEQ ID NO: 1546 - RNA, 23 nt, Homo sapiens
ucuuggaguaggucauugggugg

SEQ ID NO: 1547 - RNA, 21 nt, Homo sapiens
cuggauggcuccuccaugucu

SEQ ID NO: 1548 - RNA, 22 nt, Homo sapiens
aucaugaugggcuccucggugu

SEQ ID NO: 1549 - RNA, 22 nt, Homo sapiens
uugcauauguaggaugucccau

SEQ ID NO: 1550 - RNA, 22 nt, Homo sapiens
uggcaguguauuguuagcuggu

SEQ ID NO: 1551 - RNA, 22 nt, Homo sapiens
aggcaguguauuguuagcuggc

SEQ ID NO: 1552 - RNA, 22 nt, Homo sapiens
uuuuugcgauguguuccuaaua

SEQ ID NO: 1553 - RNA, 23 nt, Homo sapiens
aaaccguuaccauuacugaguuu

SEQ ID NO: 1554 - RNA, 22 nt, Homo sapiens
uguuugcagaggaaacugagac

SEQ ID NO: 1555 - RNA, 21 nt, Homo sapiens
ucagucucaucugcaaagaag

SEQ ID NO: 1556 - RNA, 22 nt, Homo sapiens
gagguuguccguggugaguucg

SEQ ID NO: 1557 - RNA, 25 nt, Homo sapiens
uagugcaauauugcuuauaggguuu

SEQ ID NO: 1558 - RNA, 22 nt, Homo sapiens
acccuaucaauauugucucugc

SEQ ID NO: 1559 - RNA, 22 nt, Homo sapiens
uaugugccuuuggacuacaucg

SEQ ID NO: 1560 - RNA, 23 nt, Homo sapiens
ucacuccucuccucccgucuucu

SEQ ID NO: 1561 - RNA, 22 nt, Homo sapiens
ucaggcucaguccccucccgau

SEQ ID NO: 1562 - RNA, 22 nt, Homo sapiens
gucauacacggcucuccucucu

SEQ ID NO: 1563 - RNA, 22 nt, Homo sapiens
agaggcuggccgugaugaauuc

SEQ ID NO: 1564 - RNA, 22 nt, Homo sapiens
uccuguacugagcugccccgag

SEQ ID NO: 1565 - RNA, 22 nt, Homo sapiens
aaucauacagggacauccaguu

SEQ ID NO: 1566 - RNA, 22 nt, Homo sapiens
aaucguacagggucauccacuu

SEQ ID NO: 1567 - RNA, 21 nt, Homo sapiens
cccagauaauggcacucucaa

SEQ ID NO: 1568 - RNA, 23 nt, Homo sapiens
agugacaucacauauacggcagc

SEQ ID NO: 1569 - RNA, 22 nt, Homo sapiens
caaccuggaggacuccaugcug

SEQ ID NO: 1570 - RNA, 23 nt, Homo sapiens
aguggggaacccuuccaugagga

SEQ ID NO: 1571 - RNA, 23 nt, Homo sapiens
aggaccugcgggacaagauucuu

SEQ ID NO: 1572 - RNA, 21 nt, Homo sapiens
ugaaggucuacugugugccag

SEQ ID NO: 1573 - RNA, 22 nt, Homo sapiens
uuguacaugguaggcuuucauu

SEQ ID NO: 1574 - RNA, 24 nt, Homo sapiens
ugaaacauacacgggaaaccucuu

SEQ ID NO: 1575 - RNA, 23 nt, Homo sapiens
aaacaaacauggugcacuucuuu

SEQ ID NO: 1576 - RNA, 17 nt, Homo sapiens
auuacauggccaaucuc

SEQ ID NO: 1577 - RNA, 21 nt, Homo sapiens
cagcagcacacugugguuugu

SEQ ID NO: 1578 - RNA, 23 nt, Homo sapiens
uuucaagccagggggcguuuuuc

SEQ ID NO: 1579 - RNA, 23 nt, Homo sapiens
uuaagacuugcagugauguuuaa

SEQ ID NO: 1580 - RNA, 22 nt, Homo sapiens
augcaccugggcaaggauucug

SEQ ID NO: 1581 - RNA, 22 nt, Homo sapiens
aauccuuugucccugggugaga

SEQ ID NO: 1582 - RNA, 21 nt, Homo sapiens
auccuugcuaucugggugcua

SEQ ID NO: 1583 - RNA, 23 nt, Homo sapiens
uagcagcgggaacaguucugcag

SEQ ID NO: 1584 - RNA, 21 nt, Homo sapiens
agacccuggucugcacucuau

SEQ ID NO: 1585 - RNA, 22 nt, Homo sapiens
gucaacacuugcugguuuccuc

SEQ ID NO: 1586 - RNA, 21 nt, Homo sapiens
uaaggcacccuucugaguaga

SEQ ID NO: 1587 - RNA, 21 nt, Homo sapiens
uuuugcaccuuuuggagugaa

SEQ ID NO: 1588 - RNA, 23 nt, Homo sapiens
ugauuguagccuuuuggaguaga

SEQ ID NO: 1589 - RNA, 23 nt, Homo sapiens
ugauugguacgucuguggguaga

SEQ ID NO: 1590 - RNA, 23 nt, Homo sapiens
uacucaggagaguggcaaucaca

SEQ ID NO: 1591 - RNA, 21 nt, Homo sapiens
gugucuuuugcucugcaguca

SEQ ID NO: 1592 - RNA, 22 nt, Homo sapiens
aagugcugucauagcugagguc

SEQ ID NO: 1593 - RNA, 23 nt, Homo sapiens
cacucagccuugagggcacuuuc

SEQ ID NO: 1594 - RNA, 22 nt, Homo sapiens
uucacagggaggugucauuuau

SEQ ID NO: 1595 - RNA, 20 nt, Homo sapiens
auugacacuucugugaguag

SEQ ID NO: 1596 - RNA, 21 nt, Homo sapiens
gagugccuucuuuuggagcgu

SEQ ID NO: 1597 - RNA, 24 nt, Homo sapiens
uucuccaaaagaaagcacuuucug

SEQ ID NO: 1598 - RNA, 18 nt, Homo sapiens
ugcuuccuuucagagggu

SEQ ID NO: 1599 - RNA, 23 nt, Homo sapiens
caucuggagguaagaagcacuuu

SEQ ID NO: 1600 - RNA, 22 nt, Homo sapiens
ccucuagauggaagcacugucu

SEQ ID NO: 1601 - RNA, 23 nt, Homo sapiens
aucgugcaucccuuuagaguguu

SEQ ID NO: 1602 - RNA, 22 nt, Homo sapiens
ucgugcaucccuuuagaguguu

SEQ ID NO: 1603 - RNA, 22 nt, Homo sapiens
aucgugcauccuuuuagagugu

SEQ ID NO: 1604 - RNA, 21 nt, Homo sapiens
aaagcgcuucccuuugcugga

SEQ ID NO: 1605 - RNA, 22 nt, Homo sapiens
caaagcgcuccccuuuagaggu

SEQ ID NO: 1606 - RNA, 22 nt, Homo sapiens
caaagcgcuucucuuuagagug

SEQ ID NO: 1607 - RNA, 23 nt, Homo sapiens
ucucuggagggaagcacuuucug

SEQ ID NO: 1608 - RNA, 21 nt, Homo sapiens
caaagcgcuucccuuuggagc

SEQ ID NO: 1609 - RNA, 22 nt, Homo sapiens
aaagcgcuucccuucagagugu

SEQ ID NO: 1610 - RNA, 21 nt, Homo sapiens
aaagcgcuucucuuuagagga

SEQ ID NO: 1611 - RNA, 23 nt, Homo sapiens
cucuagagggaagcacuuucucu

SEQ ID NO: 1612 - RNA, 25 nt, Homo sapiens
aaagugcauccuuuuagaguguuac

SEQ ID NO: 1613 - RNA, 23 nt, Homo sapiens
aaagugcauccuuuuagagguuu

SEQ ID NO: 1614 - RNA, 22 nt, Homo sapiens
aaagugcaucuuuuuagaggau

SEQ ID NO: 1615 - RNA, 23 nt, Homo sapiens
caaagugccucccuuuagagugu

SEQ ID NO: 1616 - RNA, 22 nt, Homo sapiens
aaagugccuccuuuuagagugu

SEQ ID NO: 1617 - RNA, 22 nt, Homo sapiens
uucuccaaaagggagcacuuuc

SEQ ID NO: 1618 - RNA, 22 nt, Homo sapiens
aaagugcuucccuuuggacugu

SEQ ID NO: 1619 - RNA, 21 nt, Homo sapiens
cuccagagggaaguacuuucu

SEQ ID NO: 1620 - RNA, 21 nt, Homo sapiens
aaagugcuuccuuuuagaggg

SEQ ID NO: 1621 - RNA, 23 nt, Homo sapiens
aaagugcuuccuuuuagaggguu

SEQ ID NO: 1622 - RNA, 23 nt, Homo sapiens
aaagugcuucucuuugguggguu

SEQ ID NO: 1623 - RNA, 23 nt, Homo sapiens
ucuacaaagggaagcccuuucug

SEQ ID NO: 1624 - RNA, 21 nt, Homo sapiens
aaagugcuuccuuuuugaggg

SEQ ID NO: 1625 - RNA, 22 nt, Homo sapiens
aagugcuuccuuuuagaggguu

SEQ ID NO: 1626 - RNA, 24 nt, Homo sapiens
acaaagugcuucccuuuagagugu

SEQ ID NO: 1627 - RNA, 22 nt, Homo sapiens
acaaagugcuucccuuuagagu

SEQ ID NO: 1628 - RNA, 22 nt, Homo sapiens
aacgcacuucccuuuagagugu

SEQ ID NO: 1629 - RNA, 23 nt, Homo sapiens
aaaaugguucccuuuagaguguu

SEQ ID NO: 1630 - RNA, 21 nt, Homo sapiens
aacgcgcuucccuauagaggg

SEQ ID NO: 1631 - RNA, 21 nt, Homo sapiens
gaaggcgcuucccuuuggagu

SEQ ID NO: 1632 - RNA, 22 nt, Homo sapiens
cuacaaagggaagcacuuucuc

SEQ ID NO: 1633 - RNA, 21 nt, Homo sapiens
cuccagagggaugcacuuucu

SEQ ID NO: 1634 - RNA, 21 nt, Homo sapiens
gaaggcgcuucccuuuagagc

SEQ ID NO: 1635 - RNA, 21 nt, Homo sapiens
cucuagagggaagcacuuucu

SEQ ID NO: 1636 - RNA, 24 nt, Homo sapiens
cucuugagggaagcacuuucuguu

SEQ ID NO: 1637 - RNA, 21 nt, Homo sapiens
aaagugcuuccuuuuagaggc

SEQ ID NO: 1638 - RNA, 24 nt, Homo sapiens
cucuagagggaagcgcuuucuguu

SEQ ID NO: 1639 - RNA, 21 nt, Homo sapiens
cugcaaagggaagcccuuucu

SEQ ID NO: 1640 - RNA, 22 nt, Homo sapiens
caugccuugaguguaggaccgu

SEQ ID NO: 1641 - RNA, 22 nt, Homo sapiens
ggagaaauuauccuuggugugu

SEQ ID NO: 1642 - RNA, 22 nt, Homo sapiens
ugugacagauugauaacugaaa

SEQ ID NO: 1643 - RNA, 22 nt, Homo sapiens
ucggggaucaucaugucacgag

SEQ ID NO: 1644 - RNA, 20 nt, Homo sapiens
auucugcauuuuuagcaagu

SEQ ID NO: 1645 - RNA, 22 nt, Homo sapiens
aucagcaaacauuuauugugug

SEQ ID NO: 1646 - RNA, 22 nt, Homo sapiens
caaaacuggcaauuacuuuugc

SEQ ID NO: 1647 - RNA, 22 nt, Homo sapiens
caagaaccucaguugcuuuugu

SEQ ID NO: 1648 - RNA, 22 nt, Homo sapiens
caaaaaucucaauuacuuuugc

SEQ ID NO: 1649 - RNA, 22 nt, Homo sapiens
caaaaaccacaguuucuuuugc

SEQ ID NO: 1650 - RNA, 21 nt, Homo sapiens
ugacaacuauggaugagcucu

SEQ ID NO: 1651 - RNA, 22 nt, Homo sapiens
ugucuuacucccucaggcacau

SEQ ID NO: 1652 - RNA, 21 nt, Homo sapiens
gcgacccacucuugguuucca

SEQ ID NO: 1653 - RNA, 21 nt, Homo sapiens
gcgacccauacuugguuucag

SEQ ID NO: 1654 - RNA, 21 nt, Homo sapiens
aacaggugacugguuagacaa

SEQ ID NO: 1655 - RNA, 21 nt, Homo sapiens
aaaacggugagauuuuguuuu

SEQ ID NO: 1656 - RNA, 21 nt, Homo sapiens
gcuaguccugacucagccagu

SEQ ID NO: 1657 - RNA, 21 nt, Homo sapiens
aggguaagcugaaccucugau

SEQ ID NO: 1658 - RNA, 20 nt, Homo sapiens
gaugagcucauuguaauaug

SEQ ID NO: 1659 - RNA, 23 nt, Homo sapiens
guuugcacgggugggccuugucu

SEQ ID NO: 1660 - RNA, 19 nt, Homo sapiens
ugagcugcuguaccaaaau

SEQ ID NO: 1661 - RNA, 21 nt, Homo sapiens
uaaaguaaauaugcaccaaaa

SEQ ID NO: 1662 - RNA, 20 nt, Homo sapiens
gcgugcgccggccggccgcc

SEQ ID NO: 1663 - RNA, 22 nt, Homo sapiens
caaaguuuaagauccuugaagu

SEQ ID NO: 1664 - RNA, 20 nt, Homo sapiens
aaaguagcuguaccauuugc

SEQ ID NO: 1665 - RNA, 19 nt, Homo sapiens
agguugacauacguuuccc

SEQ ID NO: 1666 - RNA, 19 nt, Homo sapiens
aggcacggugucagcaggc

SEQ ID NO: 1667 - RNA, 22 nt, Homo sapiens
ggcuggcucgcgaugucuguuu

SEQ ID NO: 1668 - RNA, 19 nt, Homo sapiens
gggcgccugugaucccaac

SEQ ID NO: 1669 - RNA, 23 nt, Homo sapiens
aguauguucuuccaggacagaac

SEQ ID NO: 1670 - RNA, 20 nt, Homo sapiens
auguauaaauguauacacac

SEQ ID NO: 1671 - RNA, 21 nt, Homo sapiens
aguuaaugaauccuggaaagu

SEQ ID NO: 1672 - RNA, 22 nt, Homo sapiens
gaaaacagcaauuaccuuugca

SEQ ID NO: 1673 - RNA, 21 nt, Homo sapiens
ugaguuggccaucugagugag

SEQ ID NO: 1674 - RNA, 20 nt, Homo sapiens
guccgcucggcgguggccca

SEQ ID NO: 1675 - RNA, 24 nt, Homo sapiens
cugaagugauguguaacugaucag

SEQ ID NO: 1676 - RNA, 21 nt, Homo sapiens
cacgcucaugcacacacccac

SEQ ID NO: 1677 - RNA, 19 nt, Homo sapiens
gagccaguuggacaggagc

SEQ ID NO: 1678 - RNA, 23 nt, Homo sapiens
auucuaauuucuccacgucuuug

SEQ ID NO: 1679 - RNA, 21 nt, Homo sapiens
uagauaaaauauugguaccug

SEQ ID NO: 1680 - RNA, 21 nt, Homo sapiens
cuucuugugcucuaggauugu

SEQ ID NO: 1681 - RNA, 23 nt, Homo sapiens
auucauuugguauaaaccgcgau

SEQ ID NO: 1682 - RNA, 22 nt, Homo sapiens
uugagaaugaugaaucauuagg

SEQ ID NO: 1683 - RNA, 21 nt, Homo sapiens
ucuuguguucucuagaucagu

SEQ ID NO: 1684 - RNA, 23 nt, Homo sapiens
uuacaguuguucaaccaguuacu

SEQ ID NO: 1685 - RNA, 21 nt, Homo sapiens
caaagaggaaggucccauuac

SEQ ID NO: 1686 - RNA, 22 nt, Homo sapiens
uuaugguuugccugggacugag

SEQ ID NO: 1687 - RNA, 19 nt, Homo sapiens
ugggcguaucuguaugcua

SEQ ID NO: 1688 - RNA, 22 nt, Homo sapiens
uaugcauuguauuuuuaggucc

SEQ ID NO: 1689 - RNA, 21 nt, Homo sapiens
uuuccauaggugaugagucac

SEQ ID NO: 1690 - RNA, 21 nt, Homo sapiens
uuggccacaauggguuagaac

SEQ ID NO: 1691 - RNA, 24 nt, Homo sapiens
ucagaacaaaugccgguucccaga

SEQ ID NO: 1692 - RNA, 22 nt, Homo sapiens
gagcuuauucauaaaagugcag

SEQ ID NO: 1693 - RNA, 20 nt, Homo sapiens
agaccauggguucucauugu

SEQ ID NO: 1694 - RNA, 22 nt, Homo sapiens
uugugucaauaugcgaugaugu

SEQ ID NO: 1695 - RNA, 25 nt, Homo sapiens
aggcaccagccaggcauugcucagc

SEQ ID NO: 1696 - RNA, 25 nt, Homo sapiens
cccaucugggguggccugugacuuu

SEQ ID NO: 1697 - RNA, 21 nt, Homo sapiens
gaagugugccguggugugucu

SEQ ID NO: 1698 - RNA, 21 nt, Homo sapiens
aagccugcccggcuccucggg

SEQ ID NO: 1699 - RNA, 22 nt, Homo sapiens
ugugucacucgaugaccacugu

SEQ ID NO: 1700 - RNA, 22 nt, Homo sapiens
uacgucaucguugucaucguca

SEQ ID NO: 1701 - RNA, 20 nt, Homo sapiens
guugugucaguuuaucaaac

SEQ ID NO: 1702 - RNA, 23 nt, Homo sapiens
acuuacagacaagagccuugcuc

SEQ ID NO: 1703 - RNA, 22 nt, Homo sapiens
uggucuaggauuguuggaggag

SEQ ID NO: 1704 - RNA, 23 nt, Homo sapiens
gacacgggcgacagcugcggccc

SEQ ID NO: 1705 - RNA, 22 nt, Homo sapiens
cacacacugcaauuacuuuugc

SEQ ID NO: 1706 - RNA, 19 nt, Homo sapiens
aggcugcggaauucaggac

SEQ ID NO: 1707 - RNA, 23 nt, Homo sapiens
uaaaucccauggugccuucuccu

SEQ ID NO: 1708 - RNA, 21 nt, Homo sapiens
aaacuacugaaaaucaaagau

SEQ ID NO: 1709 - RNA, 21 nt, Homo sapiens
guucaaauccagaucuauaac

SEQ ID NO: 1710 - RNA, 25 nt, Homo sapiens
aggggugguguugggacagcuccgu

SEQ ID NO: 1711 - RNA, 20 nt, Homo sapiens
aggguguuucucucaucucu

SEQ ID NO: 1712 - RNA, 21 nt, Homo sapiens
ugagcuaaaugugugcuggga

SEQ ID NO: 1713 - RNA, 23 nt, Homo sapiens
gcgaggaccccucggggucugac

SEQ ID NO: 1714 - RNA, 25 nt, Homo sapiens
gcugggcagggcuucugagcuccuu

SEQ ID NO: 1715 - RNA, 20 nt, Homo sapiens
aggaauguuccuucuuugcc

SEQ ID NO: 1716 - RNA, 23 nt, Homo sapiens
gaacgccuguucuugccaggugg

SEQ ID NO: 1717 - RNA, 21 nt, Homo sapiens
uccgagccugggucucccucu

SEQ ID NO: 1718 - RNA, 22 nt, Homo sapiens
acucaaaacccuucagugacuu

SEQ ID NO: 1719 - RNA, 22 nt, Homo sapiens
agacuucccauuugaagguggc

SEQ ID NO: 1720 - RNA, 23 nt, Homo sapiens
aaacucuacuuguccuucugagu

SEQ ID NO: 1721 - RNA, 24 nt, Homo sapiens
gaccuggacauguuugugcccagu

SEQ ID NO: 1722 - RNA, 20 nt, Homo sapiens
auggagauagauauagaaau

SEQ ID NO: 1723 - RNA, 21 nt, Homo sapiens
ggcuagcaacagcgcuuaccu

SEQ ID NO: 1724 - RNA, 21 nt, Homo sapiens
acagucugcugagguuggagc

SEQ ID NO: 1725 - RNA, 23 nt, Homo sapiens
aucccuugcaggggcuguugggu

SEQ ID NO: 1726 - RNA, 22 nt, Homo sapiens
uaguaccaguaccuuguguuca

SEQ ID NO: 1727 - RNA, 22 nt, Homo sapiens
agggggaaaguucuauaguccu

SEQ ID NO: 1728 - RNA, 19 nt, Homo sapiens
agcugucugaaaaugucuu

SEQ ID NO: 1729 - RNA, 22 nt, Homo sapiens
gugagucucuaagaaaagagga

SEQ ID NO: 1730 - RNA, 20 nt, Homo sapiens
ucuaguaagaguggcagucg

SEQ ID NO: 1731 - RNA, 22 nt, Homo sapiens
guucucccaacguaagcccagc

SEQ ID NO: 1732 - RNA, 22 nt, Homo sapiens
aguauucuguaccagggaaggu

SEQ ID NO: 1733 - RNA, 21 nt, Homo sapiens
agaccuggcccagaccucagc

SEQ ID NO: 1734 - RNA, 19 nt, Homo sapiens
gugucugcuuccuguggga

SEQ ID NO: 1735 - RNA, 23 nt, Homo sapiens
cuaauaguaucuaccacaauaaa

SEQ ID NO: 1736 - RNA, 22 nt, Homo sapiens
aaccagcaccccaacuuuggac

SEQ ID NO: 1737 - RNA, 23 nt, Homo sapiens
acuugggcacugaaacaaugucc

SEQ ID NO: 1738 - RNA, 24 nt, Homo sapiens
ugugcuugcucgucccgcccgcag

SEQ ID NO: 1739 - RNA, 24 nt, Homo sapiens
acugggggcuuucgggcucugcgu

SEQ ID NO: 1740 - RNA, 25 nt, Homo sapiens
agggaucgcgggcggguggcggccu

SEQ ID NO: 1741 - RNA, 23 nt, Homo sapiens
aucgcugcgguugcgagcgcugu

SEQ ID NO: 1742 - RNA, 21 nt, Homo sapiens
augauccaggaaccugccucu

SEQ ID NO: 1743 - RNA, 24 nt, Homo sapiens
aaagacauaggauagagucaccuc

SEQ ID NO: 1744 - RNA, 22 nt, Homo sapiens
gucccucuccaaaugugucuug

SEQ ID NO: 1745 - RNA, 22 nt, Homo sapiens
acuuguaugcuagcucagguag

SEQ ID NO: 1746 - RNA, 19 nt, Homo sapiens
aguguggcuuucuuagagc

SEQ ID NO: 1747 - RNA, 19 nt, Homo sapiens
ucuaggcugguacugcuga

SEQ ID NO: 1748 - RNA, 19 nt, Homo sapiens
aagcagcugccucugaggc

SEQ ID NO: 1749 - RNA, 21 nt, Homo sapiens
guggcugcacucacuuccuuc

SEQ ID NO: 1750 - RNA, 19 nt, Homo sapiens
aagugugcagggcacuggu

SEQ ID NO: 1751 - RNA, 22 nt, Homo sapiens
aaaccuguguuguucaagaguc

SEQ ID NO: 1752 - RNA, 21 nt, Homo sapiens
aggaggcagcgcucucaggac

SEQ ID NO: 1753 - RNA, 22 nt, Homo sapiens
uuuaggauaagcuugacuuuug

SEQ ID NO: 1754 - RNA, 23 nt, Homo sapiens
aauggcgccacuaggguugugca

SEQ ID NO: 1755 - RNA, 21 nt, Homo sapiens
uugaaacaaucucuacugaac

SEQ ID NO: 1756 - RNA, 22 nt, Homo sapiens
uggugggccgcagaacaugugc

SEQ ID NO: 1757 - RNA, 22 nt, Homo sapiens
auaauacaugguuaaccucuuu

SEQ ID NO: 1758 - RNA, 21 nt, Homo sapiens
aauauuauacagucaaccucu

SEQ ID NO: 1759 - RNA, 23 nt, Homo sapiens
ggcagguucucacccucucuagg

SEQ ID NO: 1760 - RNA, 25 nt, Homo sapiens
ggcggagggaaguagguccguuggu

SEQ ID NO: 1761 - RNA, 22 nt, Homo sapiens
cuugguucagggagggucccca

SEQ ID NO: 1762 - RNA, 22 nt, Homo sapiens
uacccauugcauaucggaguug

SEQ ID NO: 1763 - RNA, 24 nt, Homo sapiens
ugccugggucucuggccugcgcgu

SEQ ID NO: 1764 - RNA, 21 nt, Homo sapiens
ucccacguuguggcccagcag

SEQ ID NO: 1765 - RNA, 22 nt, Homo sapiens
aggcggggcgccgcgggaccgc

SEQ ID NO: 1766 - RNA, 23 nt, Homo sapiens
ugucacucggcucggcccacuac

SEQ ID NO: 1767 - RNA, 25 nt, Homo sapiens
aggaagcccuggaggggcuggaggu

SEQ ID NO: 1768 - RNA, 22 nt, Homo sapiens
uggaagacuagugauuuuguug

SEQ ID NO: 1769 - RNA, 22 nt, Homo sapiens
uuugugaccugguccacuaacc

SEQ ID NO: 1770 - RNA, 21 nt, Homo sapiens
uggaggagaaggaaggugaug

SEQ ID NO: 1771 - RNA, 22 nt, Homo sapiens
acuccagccccacagccucagc

SEQ ID NO: 1772 - RNA, 23 nt, Homo sapiens
ucugcucauaccccaugguuucu

SEQ ID NO: 1773 - RNA, 23 nt, Homo sapiens
ugcaccaugguugucugagcaug

SEQ ID NO: 1774 - RNA, 28 nt, Homo sapiens
ucacaaugcugacacucaaacugcugac

SEQ ID NO: 1775 - RNA, 26 nt, Homo sapiens
guuggaggaugaaaguacggagugau

SEQ ID NO: 1776 - RNA, 23 nt, Homo sapiens
cugggaucuccggggucuugguu

SEQ ID NO: 1777 - RNA, 22 nt, Homo sapiens
ugagaccucuggguucugagcu

SEQ ID NO: 1778 - RNA, 23 nt, Homo sapiens
uccaguaccacgugucagggcca

SEQ ID NO: 1779 - RNA, 24 nt, Homo sapiens
gauugcucugcgugcggaaucgac

SEQ ID NO: 1780 - RNA, 23 nt, Homo sapiens
caguaacaaagauucauccuugu

SEQ ID NO: 1781 - RNA, 23 nt, Homo sapiens
ucuuugguuaucuagcuguauga

SEQ ID NO: 1782 - RNA, 21 nt, Homo sapiens
uaaagcuagauaaccgaaagu

SEQ ID NO: 1783 - RNA, 21 nt, Homo sapiens
uauugcacuugucccggccug

SEQ ID NO: 1784 - RNA, 21 nt, Homo sapiens
uauugcacucgucccggccuc

SEQ ID NO: 1785 - RNA, 22 nt, Homo sapiens
aaagugcuguucgugcagguag

SEQ ID NO: 1786 - RNA, 22 nt, Homo sapiens
uucaacggguauuuauugagca

SEQ ID NO: 1787 - RNA, 22 nt, Homo sapiens
uuuggcacuagcacauuuuugc

SEQ ID NO: 1788 - RNA, 22 nt, Homo sapiens
ugagguaguaaguuguauuguu

SEQ ID NO: 1789 - RNA, 22 nt, Homo sapiens
aacccguagauccgaucuugug

SEQ ID NO: 1790 - RNA, 22 nt, Homo sapiens
cacccguagaaccgaccuugcg

SEQ ID NO: 1791 - RNA, 21 nt, Herpes Simplex Virus 1
uggaaggacgggaaguggaag

SEQ ID NO: 1792 - RNA, 23 nt, Kaposi sarcoma-associated herpesvirus
auuacaggaaacuggguguaagc

SEQ ID NO: 1793 - RNA, 22 nt, Kaposi sarcoma-associated herpesvirus
uaguguuguccccccgaguggc

SEQ ID NO: 1794 - RNA, 22 nt, Kaposi sarcoma-associated herpesvirus
ugguguuguccccccgaguggc

SEQ ID NO: 1795 - RNA, 22 nt, Kaposi sarcoma-associated herpesvirus
uuaaugcuuagccuguguccga

SEQ ID NO: 1796 - RNA, 22 nt, Kaposi sarcoma-associated herpesvirus
accaggccaccauuccucuccg

SEQ ID NO: 1797 - RNA, 22 nt, Kaposi sarcoma-associated herpesvirus
aacuguaguccgggucgaucug

SEQ ID NO: 1798 - RNA, 22 nt, Kaposi sarcoma-associated herpesvirus
ucacauucugaggacggcagcg

SEQ ID NO: 1799 - RNA, 21 nt, Kaposi sarcoma-associated herpesvirus
ucgcggucacagaaugugaca

SEQ ID NO: 1800 - RNA, 22 nt, Kaposi sarcoma-associated herpesvirus
uagaauacugaggccuagcuga

SEQ ID NO: 1801 - RNA, 22 nt, Kaposi sarcoma-associated herpesvirus
agcuaaaccgcaguacucuagg

SEQ ID NO: 1802 - RNA, 22 nt, Kaposi sarcoma-associated herpesvirus
uaggaugccuggaacuugccgg

SEQ ID NO: 1803 - RNA, 22 nt, Kaposi sarcoma-associated herpesvirus
ugaugguuuucgggcuguugag

SEQ ID NO: 1804 - RNA, 22 nt, Kaposi sarcoma-associated herpesvirus
ccagcagcaccuaauccaucgg

SEQ ID NO: 1805 - RNA, 21 nt, Kaposi sarcoma-associated herpesvirus
ugaucccauguugcuggcgcu

SEQ ID NO: 1806 - RNA, 22 nt, Kaposi sarcoma-associated herpesvirus
uaggcgcgacugagagagcacg

SEQ ID NO: 1807 - RNA, 22 nt, Kaposi sarcoma-associated herpesvirus
cuggguauacgcagcugcguaa

SEQ ID NO: 1808 - RNA, 22 nt, Kaposi sarcoma-associated herpesvirus
acccagcugcguaaaccccgcu

SEQ ID NO: 1809 - RNA, 22 nt, Lemur catta
ucccugagacccuaacuuguga

SEQ ID NO: 1810 - RNA, 22 nt, Lemur catta
uagcagcacauaaugguuugug

SEQ ID NO: 1811 - RNA, 22 nt, Lemur catta
uagcagcacguaaauauuggug

SEQ ID NO: 1812 - RNA, 20 nt, Lemur catta
acugcagugaaggcacuugu

SEQ ID NO: 1813 - RNA, 24 nt, Lemur catta
caaagugcuuacagugcagguagu

SEQ ID NO: 1814 - RNA, 22 nt, Lemur catta
uaaggugcaucuagugcagaua

SEQ ID NO: 1815 - RNA, 23 nt, Lemur catta
ugugcaaaucuaugcaaaacuga

SEQ ID NO: 1816 - RNA, 23 nt, Lemur catta
ugugcaaauccaugcaaaacuga

SEQ ID NO: 1817 - RNA, 22 nt, Lemur catta
uaaagugcuuauagugcaggua

SEQ ID NO: 1818 - RNA, 21 nt, Lemur catta
uaaucucagcuggcaacugug

SEQ ID NO: 1819 - RNA, 21 nt, Lemur catta
uugugcuugaucuaaccaugu

SEQ ID NO: 1820 - RNA, 22 nt, Lemur catta
aagcugccaguugaagaacugu

SEQ ID NO: 1821 - RNA, 21 nt, Lemur catta
aucacauugccagggauuucc

SEQ ID NO: 1822 - RNA, 22 nt, Lemur catta
uucacaguggcuaaguuccgcc

SEQ ID NO: 1823 - RNA, 22 nt, Lemur catta
uauugcacuugucccggccugu

SEQ ID NO: 1824 - RNA, 22 nt, Lagothrix lagotricha
aacccguagauccgaacuugug

SEQ ID NO: 1825 - RNA, 22 nt, Lagothrix lagotricha
uacaguacugugauaacugaag

SEQ ID NO: 1826 - RNA, 23 nt, Lagothrix lagotricha
agcagcauuguacagggcuauga

SEQ ID NO: 1827 - RNA, 20 nt, Lagothrix lagotricha
ucaaaugcucagacuccugu

SEQ ID NO: 1828 - RNA, 21 nt, Lagothrix lagotricha
uaaagugcugacagugcagau

SEQ ID NO: 1829 - RNA, 23 nt, Lagothrix lagotricha
agcagcauuguacagggcuauca

SEQ ID NO: 1830 - RNA, 22 nt, Lagothrix lagotricha
uuaaggcacgcggugaaugcca

SEQ ID NO: 1831 - RNA, 22 nt, Lagothrix lagotricha
ucccugagacccuaacuuguga

SEQ ID NO: 1832 - RNA, 22 nt, Lagothrix lagotricha
ucggauccgucugagcuuggcu

SEQ ID NO: 1833 - RNA, 22 nt, Lagothrix lagotricha
uugguccccuucaaccagcugu

SEQ ID NO: 1834 - RNA, 23 nt, Lagothrix lagotricha
uauggcuuuuuauuccuauguga

SEQ ID NO: 1835 - RNA, 18 nt, Lagothrix lagotricha
ucuacagugcacgugucu

SEQ ID NO: 1836 - RNA, 22 nt, Lagothrix lagotricha
ugagaugaagcacuguagcuca

SEQ ID NO: 1837 - RNA, 22 nt, Lagothrix lagotricha
uagcagcacauaaugguuugug

SEQ ID NO: 1838 - RNA, 22 nt, Lagothrix lagotricha
uagcagcacaucaugguuuaca

SEQ ID NO: 1839 - RNA, 22 nt, Lagothrix lagotricha
uagcagcacguaaauauuggcg

SEQ ID NO: 1840 - RNA, 20 nt, Lagothrix lagotricha
acugcagugaaggcacuugu

SEQ ID NO: 1841 - RNA, 24 nt, Lagothrix lagotricha
caaagugcuuacagugcagguagu

SEQ ID NO: 1842 - RNA, 22 nt, Lagothrix lagotricha
uaaggugcaucuagugcagaua

SEQ ID NO: 1843 - RNA, 23 nt, Lagothrix lagotricha
aacauucaacgcugucggugagu

SEQ ID NO: 1844 - RNA, 22 nt, Lagothrix lagotricha
accaucgaccguugauuguacc

SEQ ID NO: 1845 - RNA, 24 nt, Lagothrix lagotricha
aacauucauugcugucgguggguu

SEQ ID NO: 1846 - RNA, 22 nt, Lagothrix lagotricha
uagguaguuucauguuguuggg

SEQ ID NO: 1847 - RNA, 19 nt, Lagothrix lagotricha
gguccagaagggagcuagg

SEQ ID NO: 1848 - RNA, 23 nt, Lagothrix lagotricha
cccaguguucagacuaccuguuc

SEQ ID NO: 1849 - RNA, 23 nt, Lagothrix lagotricha
ugugcaaaucuaugcaaaacuga

SEQ ID NO: 1850 - RNA, 23 nt, Lagothrix lagotricha
ugugcaaauccaugcaaaacuga

SEQ ID NO: 1851 - RNA, 22 nt, Lagothrix lagotricha
uaaagugcuuauagugcaggua

SEQ ID NO: 1852 - RNA, 22 nt, Lagothrix lagotricha
uccuucauuccaccggagucug

SEQ ID NO: 1853 - RNA, 21 nt, Lagothrix lagotricha
uugugcuugaucuaaccaugu

SEQ ID NO: 1854 - RNA, 22 nt, Lagothrix lagotricha
aagcugccaguugaagaacugu

SEQ ID NO: 1855 - RNA, 22 nt, Lagothrix lagotricha
cauugcacuugucucggucuga

SEQ ID NO: 1856 - RNA, 22 nt, Lagothrix lagotricha
uucaaguaauccaggauaggcu

SEQ ID NO: 1857 - RNA, 22 nt, Lagothrix lagotricha
aaggagcucacagucuauugag

SEQ ID NO: 1858 - RNA, 22 nt, Lagothrix lagotricha
cuagcaccaucugaaaucgguu

SEQ ID NO: 1859 - RNA, 20 nt, Lagothrix lagotricha
uagcaccauuugaaaucagu

SEQ ID NO: 1860 - RNA, 21 nt, Lagothrix lagotricha
uguaaacauccuacacucagc

SEQ ID NO: 1861 - RNA, 23 nt, Lagothrix lagotricha
uguaaacauccuacacucucagc

SEQ ID NO: 1862 - RNA, 22 nt, Lagothrix lagotricha
uggcagugucuuagcugguugu

SEQ ID NO: 1863 - RNA, 21 nt, Lagothrix lagotricha
uggaagacuagugauuuuguu

SEQ ID NO: 1864 - RNA, 23 nt, Lagothrix lagotricha
ucuuugguuaucuagcuguauga

SEQ ID NO: 1865 - RNA, 22 nt, Lagothrix lagotricha
uauugcacuugucccggccugu

SEQ ID NO: 1866 - RNA, 22 nt, Lagothrix lagotricha
aaagugcuguucgugcagguag

SEQ ID NO: 1867 - RNA, 22 nt, Lagothrix lagotricha
uucaacggguauuuauugagca

SEQ ID NO: 1868 - RNA, 22 nt, Lagothrix lagotricha
aacccguagauccgaucuugug

SEQ ID NO: 1869 - RNA, 22 nt, Monodelphis domestica
ugagguaguagguuguauaguu

SEQ ID NO: 1870 - RNA, 22 nt, Monodelphis domestica
ugagguaguagguugugugguu

SEQ ID NO: 1871 - RNA, 21 nt, Monodelphis domestica
agagguaguagguugcauagu

SEQ ID NO: 1872 - RNA, 22 nt, Monodelphis domestica
ugagguaguagauuguauaguu

SEQ ID NO: 1873 - RNA, 21 nt, Monodelphis domestica
ugagguaguaguuuguacagu

SEQ ID NO: 1874 - RNA, 21 nt, Monodelphis domestica
ugagguaguaguuugugcugu

SEQ ID NO: 1875 - RNA, 21 nt, Monodelphis domestica
uggaauguaaagaaguaugua

SEQ ID NO: 1876 - RNA, 21 nt, Monodelphis domestica
aacccguagauccgaacuugu

SEQ ID NO: 1877 - RNA, 22 nt, Monodelphis domestica
uacaguacugugauaacugaag

SEQ ID NO: 1878 - RNA, 23 nt, Monodelphis domestica
agcagcauuguacagggcuauga

SEQ ID NO: 1879 - RNA, 23 nt, Monodelphis domestica
agcagcauuguacagggcuauca

SEQ ID NO: 1880 - RNA, 23 nt, Monodelphis domestica
uacccuguagauccgaauuugug

SEQ ID NO: 1881 - RNA, 23 nt, Monodelphis domestica
auacccuguagaaccgaauuugu

SEQ ID NO: 1882 - RNA, 25 nt, Monodelphis domestica
uggagugugacaaugguguuugugu

SEQ ID NO: 1883 - RNA, 22 nt, Monodelphis domestica
uuaaggcacgcggugaaugcca

SEQ ID NO: 1884 - RNA, 22 nt, Monodelphis domestica
ucccugagacccuaacuuguga

SEQ ID NO: 1885 - RNA, 21 nt, Monodelphis domestica
ucacagugaaccggucucuuu

SEQ ID NO: 1886 - RNA, 22 nt, Monodelphis domestica
cuuuuugcggucugggcuugcu

SEQ ID NO: 1887 - RNA, 22 nt, Monodelphis domestica
cagugcaauguaaaaagggcau

SEQ ID NO: 1888 - RNA, 22 nt, Monodelphis domestica
uaacagucuacagccauggucg

SEQ ID NO: 1889 - RNA, 22 nt, Monodelphis domestica
uugguccccuucaaccagcugu

SEQ ID NO: 1890 - RNA, 23 nt, Monodelphis domestica
uauggcuuuuuauuccuauguga

SEQ ID NO: 1891 - RNA, 22 nt, Monodelphis domestica
uauggcuuuucauuccuaugug

SEQ ID NO: 1892 - RNA, 22 nt, Monodelphis domestica
uauugcuuaagaauacgcguag

SEQ ID NO: 1893 - RNA, 17 nt, Monodelphis domestica
agcugguguugugaauc

SEQ ID NO: 1894 - RNA, 22 nt, Monodelphis domestica
uaacacugucugguaaagaugc

SEQ ID NO: 1895 - RNA, 23 nt, Monodelphis domestica
uguaguguuuccuacuuuaugga

SEQ ID NO: 1896 - RNA, 22 nt, Monodelphis domestica
ugagaugaagcacuguagcucg

SEQ ID NO: 1897 - RNA, 22 nt, Monodelphis domestica
uacaguauagaugauguacugg

SEQ ID NO: 1898 - RNA, 23 nt, Monodelphis domestica
guccaguuuucccaggaaucccu

SEQ ID NO: 1899 - RNA, 22 nt, Monodelphis domestica
ucagugcaugacagaacuuggg

SEQ ID NO: 1900 - RNA, 22 nt, Monodelphis domestica
uagcagcacauaaugguuuguu

SEQ ID NO: 1901 - RNA, 22 nt, Monodelphis domestica
uagcagcacguaaauauuggcg

SEQ ID NO: 1902 - RNA, 21 nt, Monodelphis domestica
acugcagugaaggcacuugua

SEQ ID NO: 1903 - RNA, 24 nt, Monodelphis domestica
caaagugcuuacagugcagguagu

SEQ ID NO: 1904 - RNA, 22 nt, Monodelphis domestica
uaaggugcaucuagugcagaua

SEQ ID NO: 1905 - RNA, 23 nt, Monodelphis domestica
aacauucaacgcugucggugagu

SEQ ID NO: 1906 - RNA, 22 nt, Monodelphis domestica
aacauucauugcugucgguggg

SEQ ID NO: 1907 - RNA, 23 nt, Monodelphis domestica
aacauucaacgcugucggugagu

SEQ ID NO: 1908 - RNA, 22 nt, Monodelphis domestica
uuuggcaaugguagaacucaca

SEQ ID NO: 1909 - RNA, 23 nt, Monodelphis domestica
uauggcacugguagaauucacug

SEQ ID NO: 1910 - RNA, 22 nt, Monodelphis domestica
uggacggagaacugauaagggu

SEQ ID NO: 1911 - RNA, 23 nt, Monodelphis domestica
caaagaauucuccuuuugggcuu

SEQ ID NO: 1912 - RNA, 20 nt, Monodelphis domestica
ucgugucuuguguugcagcc

SEQ ID NO: 1913 - RNA, 22 nt, Monodelphis domestica
caacggaaucccaaaagcagcu

SEQ ID NO: 1914 - RNA, 21 nt, Monodelphis domestica
aacuggccuacaaagucccag

SEQ ID NO: 1915 - RNA, 21 nt, Monodelphis domestica
uagguaguuuccuguuguugg

SEQ ID NO: 1916 - RNA, 23 nt, Monodelphis domestica
cccaguguuuagacuaucuguuc

SEQ ID NO: 1917 - RNA, 23 nt, Monodelphis domestica
ugugcaaaucuaugcaaaacuga

SEQ ID NO: 1918 - RNA, 23 nt, Monodelphis domestica
ugugcaaauccaugcaaaacuga

SEQ ID NO: 1919 - RNA, 23 nt, Monodelphis domestica
uaaagugcuuauagugcagguag

SEQ ID NO: 1920 - RNA, 22 nt, Monodelphis domestica
uaacacugucugguaacgaugu

SEQ ID NO: 1921 - RNA, 22 nt, Monodelphis domestica
caucuuacuagacagugcugga

SEQ ID NO: 1922 - RNA, 22 nt, Monodelphis domestica
uaauacugccugguaaugauga

SEQ ID NO: 1923 - RNA, 22 nt, Monodelphis domestica
uaauacugccggguaaugaugg

SEQ ID NO: 1924 - RNA, 22 nt, Monodelphis domestica
gugaaauguuuaggaccacuug

SEQ ID NO: 1925 - RNA, 22 nt, Monodelphis domestica
uucccuuugucauccuaugccu

SEQ ID NO: 1926 - RNA, 21 nt, Monodelphis domestica
uggaauguaaggaagugugug

SEQ ID NO: 1927 - RNA, 22 nt, Monodelphis domestica
auaagacgagcaaaaagcucgu

SEQ ID NO: 1928 - RNA, 22 nt, Monodelphis domestica
uagcuuaucagacugauguuga

SEQ ID NO: 1929 - RNA, 21 nt, Monodelphis domestica
uaacagucuccagucacggcc

SEQ ID NO: 1930 - RNA, 21 nt, Monodelphis domestica
acagcaggcacagacaggcag

SEQ ID NO: 1931 - RNA, 21 nt, Monodelphis domestica
uaaucucagcuggcaacugug

SEQ ID NO: 1932 - RNA, 24 nt, Monodelphis domestica
uacugcaucaggaacugauuggau

SEQ ID NO: 1933 - RNA, 21 nt, Monodelphis domestica
uugugcuugaucuaaccaugu

SEQ ID NO: 1934 - RNA, 21 nt, Monodelphis domestica
ugauuguccaaacgcaauucu

SEQ ID NO: 1935 - RNA, 22 nt, Monodelphis domestica
aagcugccaguugaagaacugc

SEQ ID NO: 1936 - RNA, 23 nt, Monodelphis domestica
agcuacauugucugcuggguuuc

SEQ ID NO: 1937 - RNA, 24 nt, Monodelphis domestica
agcuacaucuggcuacugggucuc

SEQ ID NO: 1938 - RNA, 21 nt, Monodelphis domestica
ugucaguuugucaaauacccc

SEQ ID NO: 1939 - RNA, 20 nt, Monodelphis domestica
aucacauugccagggauuuc

SEQ ID NO: 1940 - RNA, 21 nt, Monodelphis domestica
aucacauugccagggauuacc

SEQ ID NO: 1941 - RNA, 16 nt, Monodelphis domestica
uggcucaguucagcag

SEQ ID NO: 1942 - RNA, 22 nt, Monodelphis domestica
cauugcacuugucucggucuga

SEQ ID NO: 1943 - RNA, 21 nt, Monodelphis domestica
uucacaguggcuaaguuccgc

SEQ ID NO: 1944 - RNA, 21 nt, Monodelphis domestica
uucacaguggcuaaguucugc

SEQ ID NO: 1945 - RNA, 20 nt, Monodelphis domestica
uagcaccauuugaaaucggu

SEQ ID NO: 1946 - RNA, 20 nt, Monodelphis domestica
uagcaccauuugaaaucagu

SEQ ID NO: 1947 - RNA, 20 nt, Monodelphis domestica
uaagugcuuccauguuuuag

SEQ ID NO: 1948 - RNA, 20 nt, Monodelphis domestica
uaagugcuuccauguuuugg

SEQ ID NO: 1949 - RNA, 21 nt, Monodelphis domestica
uaagugcuuccauguuucagu

SEQ ID NO: 1950 - RNA, 21 nt, Monodelphis domestica
uaagugcuuccauguuugagu

SEQ ID NO: 1951 - RNA, 22 nt, Monodelphis domestica
uguaaacauccucgacuggaag

SEQ ID NO: 1952 - RNA, 24 nt, Monodelphis domestica
ggaggcaagauguuggcauagcug

SEQ ID NO: 1953 - RNA, 21 nt, Monodelphis domestica
uauugcacauuacuaaguugc

SEQ ID NO: 1954 - RNA, 23 nt, Monodelphis domestica
uccagcaucagugauuuuguuga

SEQ ID NO: 1955 - RNA, 23 nt, Monodelphis domestica
uggcagugucuuagcugguuguu

SEQ ID NO: 1956 - RNA, 22 nt, Monodelphis domestica
uaaugccccuaaaaauccuuau

SEQ ID NO: 1957 - RNA, 23 nt, Monodelphis domestica
gaauugcacuuuagcaaugguga

SEQ ID NO: 1958 - RNA, 23 nt, Monodelphis domestica
uuuuguucguucggcucgcguga

SEQ ID NO: 1959 - RNA, 22 nt, Monodelphis domestica
agaucagaaggugauuguggcu

SEQ ID NO: 1960 - RNA, 22 nt, Monodelphis domestica
aucgggaauaucguguccgucc

SEQ ID NO: 1961 - RNA, 22 nt, Monodelphis domestica
uggcaguguauuguuagcuggu

SEQ ID NO: 1962 - RNA, 22 nt, Monodelphis domestica
aaaccguuaccauuacuguguu

SEQ ID NO: 1963 - RNA, 22 nt, Monodelphis domestica
uggaagacuagugauuuuguug

SEQ ID NO: 1964 - RNA, 23 nt, Monodelphis domestica
ucuuugguuaucuagcuguauga

SEQ ID NO: 1965 - RNA, 21 nt, Monodelphis domestica
uaaagcuagauaaccgaaagu

SEQ ID NO: 1966 - RNA, 21 nt, Monodelphis domestica
uauugcacuugucccggccug

SEQ ID NO: 1967 - RNA, 22 nt, Monodelphis domestica
aaagugcuguucgugcagguag

SEQ ID NO: 1968 - RNA, 23 nt, Monodelphis domestica
uuuggcacuagcacauuuuugcu

SEQ ID NO: 1969 - RNA, 20 nt, Mareks disease virus
ugcuuguucacugugcggca

SEQ ID NO: 1970 - RNA, 23 nt, Mareks disease virus
guuguauucugcccgguaguccg

SEQ ID NO: 1971 - RNA, 21 nt, Mareks disease virus
cggacugccgcagaauagcuu

SEQ ID NO: 1972 - RNA, 24 nt, Mareks disease virus
augaaaaugugaaaccucucccgc

SEQ ID NO: 1973 - RNA, 23 nt, Mareks disease virus
uuaaugcuguaucggaacccuuc

SEQ ID NO: 1974 - RNA, 21 nt, Mareks disease virus
aaugguucugacagcaugacc

SEQ ID NO: 1975 - RNA, 23 nt, Mareks disease virus
uguguaucguggucgucuacugu

SEQ ID NO: 1976 - RNA, 22 nt, Mareks disease virus
gagaucccugcgaaaugacagu

SEQ ID NO: 1977 - RNA, 23 nt, Mareks disease virus
ucgagaucucuacgagauuacag

SEQ ID NO: 1978 - RNA, 22 nt, Mareks disease virus
gugaccucuacggaacaauagu

SEQ ID NO: 1979 - RNA, 22 nt, Mouse gammaherpesvirus 68
uagaaauggccguacuuccuuu

SEQ ID NO: 1980 - RNA, 22 nt, Mouse gammaherpesvirus 68
cagacccccucucccccucuuu

SEQ ID NO: 1981 - RNA, 22 nt, Mouse gammaherpesvirus 68
gaggugagcaggaguugcgcuu

SEQ ID NO: 1982 - RNA, 22 nt, Mouse gammaherpesvirus 68
ucgaggagcacguguuauucua

SEQ ID NO: 1983 - RNA, 22 nt, Mouse gammaherpesvirus 68
agaguugagaucgggucgucuc

SEQ ID NO: 1984 - RNA, 22 nt, Mouse gammaherpesvirus 68
ugaaacugugugaggugguuuu

SEQ ID NO: 1985 - RNA, 21 nt, Mouse gammaherpesvirus 68
gauaucgcgcccaccuuuauu

SEQ ID NO: 1986 - RNA, 22 nt, Mouse gammaherpesvirus 68
aaagguggaggugcgguaaccu

SEQ ID NO: 1987 - RNA, 22 nt, Mouse gammaherpesvirus 68
agcacucacuggggguuugguc

SEQ ID NO: 1988 - RNA, 22 nt, Mouse gammaherpesvirus 68
ucacauuugccuggaccuuuuu

SEQ ID NO: 1989 - RNA, 22 nt, Macaca mulatta
aacccguagauccgaacuugug

SEQ ID NO: 1990 - RNA, 22 nt, Macaca mulatta
uacaguacugugauaacugaag

SEQ ID NO: 1991 - RNA, 23 nt, Macaca mulatta
agcagcauuguacagggcuauga

SEQ ID NO: 1992 - RNA, 20 nt, Macaca mulatta
ucaaaugcucagacuccugu

SEQ ID NO: 1993 - RNA, 24 nt, Macaca mulatta
aaaagugcuuacagugcagguagc

SEQ ID NO: 1994 - RNA, 21 nt, Macaca mulatta
uaaagugcugacagugcagau

SEQ ID NO: 1995 - RNA, 23 nt, Macaca mulatta
agcagcauuguacagggcuauca

SEQ ID NO: 1996 - RNA, 22 nt, Macaca mulatta
uuaaggcacgcggugaaugcca

SEQ ID NO: 1997 - RNA, 22 nt, Macaca mulatta
ucccugagacccuaacuuguga

SEQ ID NO: 1998 - RNA, 22 nt, Macaca mulatta
ucggauccgucugagcuuggcu

SEQ ID NO: 1999 - RNA, 22 nt, Macaca mulatta
ucacagugaaccggucucuuuu

SEQ ID NO: 2000 - RNA, 20 nt, Macaca mulatta
cagugcaauguuaaaagggc

SEQ ID NO: 2001 - RNA, 21 nt, Macaca mulatta
uuguccccuucaaccagcugu

SEQ ID NO: 2002 - RNA, 23 nt, Macaca mulatta
uauggcuuuuuauuccuauguga

SEQ ID NO: 2003 - RNA, 21 nt, Macaca mulatta
aacacugucugguaaagaugg

SEQ ID NO: 2004 - RNA, 24 nt, Macaca mulatta
guccaguuuucccaggaaucccuu

SEQ ID NO: 2005 - RNA, 20 nt, Macaca mulatta
uugcauagucacaaaaguga

SEQ ID NO: 2006 - RNA, 22 nt, Macaca mulatta
uagcagcacauaaugguuugug

SEQ ID NO: 2007 - RNA, 22 nt, Macaca mulatta
uagcagcacaucaugguuuaca

SEQ ID NO: 2008 - RNA, 22 nt, Macaca mulatta
uagcagcacguaaauauuggcg

SEQ ID NO: 2009 - RNA, 20 nt, Macaca mulatta
acugcagugaaggcacuugu

SEQ ID NO: 2010 - RNA, 24 nt, Macaca mulatta
caaagugcuuacagugcagguagu

SEQ ID NO: 2011 - RNA, 22 nt, Macaca mulatta
uaaggugcaucuagugcagaua

SEQ ID NO: 2012 - RNA, 23 nt, Macaca mulatta
aacauucaacgcugucggugagu

SEQ ID NO: 2013 - RNA, 22 nt, Macaca mulatta
accaucgaccguugauuguacc

SEQ ID NO: 2014 - RNA, 24 nt, Macaca mulatta
aacauucauugcugucgguggguu

SEQ ID NO: 2015 - RNA, 22 nt, Macaca mulatta
aacauucaaccugucggugagu

SEQ ID NO: 2016 - RNA, 22 nt, Macaca mulatta
uuuggcaaugguagaacucaca

SEQ ID NO: 2017 - RNA, 23 nt, Macaca mulatta
uauggcacugguagaauucacug

SEQ ID NO: 2018 - RNA, 22 nt, Macaca mulatta
caucccuugcaugguggagggu

SEQ ID NO: 2019 - RNA, 23 nt, Macaca mulatta
gugccuacugagcugauaucagu

SEQ ID NO: 2020 - RNA, 22 nt, Macaca mulatta
ugauauguuugauauauuaggu

SEQ ID NO: 2021 - RNA, 22 nt, Macaca mulatta
uguaacagcaacuccaugugga

SEQ ID NO: 2022 - RNA, 21 nt, Macaca mulatta
uagguaguuucauguuguugg

SEQ ID NO: 2023 - RNA, 19 nt, Macaca mulatta
gguccagaggggaaauagg

SEQ ID NO: 2024 - RNA, 23 nt, Macaca mulatta
cccaguguucagacuaccuguuc

SEQ ID NO: 2025 - RNA, 23 nt, Macaca mulatta
ugugcaaaucuaugcaaaacuga

SEQ ID NO: 2026 - RNA, 23 nt, Macaca mulatta
ugugcaaauccaugcaaaacuga

SEQ ID NO: 2027 - RNA, 22 nt, Macaca mulatta
uaaagugcuuauagugcaggua

SEQ ID NO: 2028 - RNA, 22 nt, Macaca mulatta
aauacugccggguaaugaugga

SEQ ID NO: 2029 - RNA, 22 nt, Macaca mulatta
uagcuuaucagacugauguuga

SEQ ID NO: 2030 - RNA, 22 nt, Macaca mulatta
uucccuuugucauccuuugccu

SEQ ID NO: 2031 - RNA, 21 nt, Macaca mulatta
acagcaggcacagacaggcag

SEQ ID NO: 2032 - RNA, 21 nt, Macaca mulatta
augaccuaugaauugacagac

SEQ ID NO: 2033 - RNA, 21 nt, Macaca mulatta
uugugcuugaucuaaccaugu

SEQ ID NO: 2034 - RNA, 21 nt, Macaca mulatta
ugauuguccaaacgcaauucu

SEQ ID NO: 2035 - RNA, 22 nt, Macaca mulatta
aagcugccaguugaagaacugu

SEQ ID NO: 2036 - RNA, 22 nt, Macaca mulatta
ccaccaccaugucugacacuuu

SEQ ID NO: 2037 - RNA, 23 nt, Macaca mulatta
agcuacauugucugcuggguuuc

SEQ ID NO: 2038 - RNA, 21 nt, Macaca mulatta
ugucaguuugucaaauacccc

SEQ ID NO: 2039 - RNA, 23 nt, Macaca mulatta
caagucacuagugguuccguuua

SEQ ID NO: 2040 - RNA, 21 nt, Macaca mulatta
aucacauugccagggauuucc

SEQ ID NO: 2041 - RNA, 22 nt, Macaca mulatta
uggcucaguucagcaggaacag

SEQ ID NO: 2042 - RNA, 22 nt, Macaca mulatta
cauugcacuugucucggucuga

SEQ ID NO: 2043 - RNA, 22 nt, Macaca mulatta
uucaaguaauccaggauaggcu

SEQ ID NO: 2044 - RNA, 22 nt, Macaca mulatta
uucacaguggcuaaguuccgcc

SEQ ID NO: 2045 - RNA, 22 nt, Macaca mulatta
aaggagcucacagucuauugag

SEQ ID NO: 2046 - RNA, 22 nt, Macaca mulatta
cuagcaccaucugaaaucgguu

SEQ ID NO: 2047 - RNA, 22 nt, Macaca mulatta
cuuucagucggauguuugcagc

SEQ ID NO: 2048 - RNA, 22 nt, Macaca mulatta
uguaaacauccucgacuggaag

SEQ ID NO: 2049 - RNA, 21 nt, Macaca mulatta
uguaaacauccuacacucagc

SEQ ID NO: 2050 - RNA, 21 nt, Macaca mulatta
ggcaagaugcuggcauagcug

SEQ ID NO: 2051 - RNA, 21 nt, Macaca mulatta
uauugcacauuacuaaguugc

SEQ ID NO: 2052 - RNA, 19 nt, Macaca mulatta
gugcauuguaguugcauug

SEQ ID NO: 2053 - RNA, 22 nt, Macaca mulatta
uggcagugucuuagcugguugu

SEQ ID NO: 2054 - RNA, 22 nt, Macaca mulatta
uauugcacuugucccggccugu

SEQ ID NO: 2055 - RNA, 22 nt, Macaca mulatta
aaagugcuguucgugcagguag

SEQ ID NO: 2056 - RNA, 22 nt, Macaca mulatta
uuuggcacuagcacauuuuugc

SEQ ID NO: 2057 - RNA, 22 nt, Macaca mulatta
ugagguaguaaguuguauuguu

SEQ ID NO: 2058 - RNA, 22 nt, Macaca mulatta
aacccguagauccgaucuugug

SEQ ID NO: 2059 - RNA, 21 nt, Mus musculus
ugagguaguagguuguauagu

SEQ ID NO: 2060 - RNA, 22 nt, Mus musculus
ugagguaguagguugugugguu

SEQ ID NO: 2061 - RNA, 22 nt, Mus musculus
ugagguaguagguuguaugguu

SEQ ID NO: 2062 - RNA, 21 nt, Mus musculus
agagguaguagguugcauagu

SEQ ID NO: 2063 - RNA, 22 nt, Mus musculus
cuauacgaccugcugccuuucu

SEQ ID NO: 2064 - RNA, 21 nt, Mus musculus
ugagguaggagguuguauagu

SEQ ID NO: 2065 - RNA, 21 nt, Mus musculus
ugagguaguagauuguauagu

SEQ ID NO: 2066 - RNA, 21 nt, Mus musculus
ugagguaguaguuuguacagu

SEQ ID NO: 2067 - RNA, 21 nt, Mus musculus
ugagguaguaguuugugcugu

SEQ ID NO: 2068 - RNA, 21 nt, Mus musculus
uggaauguaaagaaguaugua

SEQ ID NO: 2069 - RNA, 22 nt, Mus musculus
aacccguagauccgaacuugug

SEQ ID NO: 2070 - RNA, 22 nt, Mus musculus
uacaguacugugauaacugaag

SEQ ID NO: 2071 - RNA, 22 nt, Mus musculus
uacaguacugugauagcugaag

SEQ ID NO: 2072 - RNA, 23 nt, Mus musculus
agcagcauuguacagggcuauga

SEQ ID NO: 2073 - RNA, 22 nt, Mus musculus
caaagugcuaacagugcaggua

SEQ ID NO: 2074 - RNA, 21 nt, Mus musculus
uaaagugcugacagugcagau

SEQ ID NO: 2075 - RNA, 23 nt, Mus musculus
agcagcauuguacagggcuauca

SEQ ID NO: 2076 - RNA, 23 nt, Mus musculus
uacccuguagauccgaauuugug

SEQ ID NO: 2077 - RNA, 22 nt, Mus musculus
cccuguagaaccgaauuugugu

SEQ ID NO: 2078 - RNA, 23 nt, Mus musculus
uggagugugacaaugguguuugu

SEQ ID NO: 2079 - RNA, 20 nt, Mus musculus
uaaggcacgcggugaaugcc

SEQ ID NO: 2080 - RNA, 23 nt, Mus musculus
ucccugagacccuuuaaccugug

SEQ ID NO: 2081 - RNA, 22 nt, Mus musculus
ucccugagacccuaacuuguga

SEQ ID NO: 2082 - RNA, 21 nt, Mus musculus
ucguaccgugaguaauaaugc

SEQ ID NO: 2083 - RNA, 21 nt, Mus musculus
cauuauuacuuuugguacgcg

SEQ ID NO: 2084 - RNA, 21 nt, Mus musculus
ucggauccgucugagcuuggc

SEQ ID NO: 2085 - RNA, 22 nt, Mus musculus
ucacagugaaccggucucuuuu

SEQ ID NO: 2086 - RNA, 22 nt, Mus musculus
ucacagugaaccggucucuuuc

SEQ ID NO: 2087 - RNA, 22 nt, Mus musculus
aagcccuuaccccaaaaagcau

SEQ ID NO: 2088 - RNA, 22 nt, Mus musculus
cuuuuugcggucugggcuugcu

SEQ ID NO: 2089 - RNA, 22 nt, Mus musculus
cagugcaauguuaaaagggcau

SEQ ID NO: 2090 - RNA, 22 nt, Mus musculus
cagugcaaugaugaaagggcau

SEQ ID NO: 2091 - RNA, 22 nt, Mus musculus
uaacagucuacagccauggucg

SEQ ID NO: 2092 - RNA, 22 nt, Mus musculus
uugguccccuucaaccagcugu

SEQ ID NO: 2093 - RNA, 21 nt, Mus musculus
gcugguaaaauggaaccaaau

SEQ ID NO: 2094 - RNA, 21 nt, Mus musculus
uugguccccuucaaccagcua

SEQ ID NO: 2095 - RNA, 22 nt, Mus musculus
ugugacugguugaccagagggg

SEQ ID NO: 2096 - RNA, 23 nt, Mus musculus
uauggcuuuuuauuccuauguga

SEQ ID NO: 2097 - RNA, 22 nt, Mus musculus
uauggcuuuucauuccuaugug

SEQ ID NO: 2098 - RNA, 23 nt, Mus musculus
acuccauuuguuuugaugaugga

SEQ ID NO: 2099 - RNA, 23 nt, Mus musculus
uuauugcuuaagaauacgcguag

SEQ ID NO: 2100 - RNA, 17 nt, Mus musculus
agcugguguugugaauc

SEQ ID NO: 2101 - RNA, 18 nt, Mus musculus
ucuacagugcacgugucu

SEQ ID NO: 2102 - RNA, 22 nt, Mus musculus
cagugguuuuacccuaugguag

SEQ ID NO: 2103 - RNA, 22 nt, Mus musculus
uaccacaggguagaaccacgga

SEQ ID NO: 2104 - RNA, 22 nt, Mus musculus
uaacacugucugguaaagaugg

SEQ ID NO: 2105 - RNA, 22 nt, Mus musculus
uguaguguuuccuacuuuaugg

SEQ ID NO: 2106 - RNA, 20 nt, Mus musculus
cauaaaguagaaagcacuac

SEQ ID NO: 2107 - RNA, 22 nt, Mus musculus
ugagaugaagcacuguagcuca

SEQ ID NO: 2108 - RNA, 22 nt, Mus musculus
uacaguauagaugauguacuag

SEQ ID NO: 2109 - RNA, 24 nt, Mus musculus
guccaguuuucccaggaaucccuu

SEQ ID NO: 2110 - RNA, 22 nt, Mus musculus
ugagaacugaauuccauggguu

SEQ ID NO: 2111 - RNA, 22 nt, Mus musculus
ugagaacugaauuccauaggcu

SEQ ID NO: 2112 - RNA, 22 nt, Mus musculus
ucagugcacuacagaacuuugu

SEQ ID NO: 2113 - RNA, 22 nt, Mus musculus
ucagugcaucacagaacuuugu

SEQ ID NO: 2114 - RNA, 22 nt, Mus musculus
ucuggcuccgugucuucacucc

SEQ ID NO: 2115 - RNA, 22 nt, Mus musculus
ucucccaacccuuguaccagug

SEQ ID NO: 2116 - RNA, 21 nt, Mus musculus
cuagacugaggcuccuugagg

SEQ ID NO: 2117 - RNA, 22 nt, Mus musculus
ucagugcaugacagaacuuggg

SEQ ID NO: 2118 - RNA, 22 nt, Mus musculus
uugcauagucacaaaagugauc

SEQ ID NO: 2119 - RNA, 22 nt, Mus musculus
uagguuauccguguugccuucg

SEQ ID NO: 2120 - RNA, 22 nt, Mus musculus
uuaaugcuaauugugauagggg

SEQ ID NO: 2121 - RNA, 22 nt, Mus musculus
uagcagcacauaaugguuugug

SEQ ID NO: 2122 - RNA, 22 nt, Mus musculus
uagcagcacaucaugguuuaca

SEQ ID NO: 2123 - RNA, 22 nt, Mus musculus
uagcagcacguaaauauuggcg

SEQ ID NO: 2124 - RNA, 21 nt, Mus musculus
acugcagugagggcacuugua

SEQ ID NO: 2125 - RNA, 24 nt, Mus musculus
caaagugcuuacagugcagguagu

SEQ ID NO: 2126 - RNA, 22 nt, Mus musculus
uaaggugcaucuagugcagaua

SEQ ID NO: 2127 - RNA, 23 nt, Mus musculus
aacauucaacgcugucggugagu

SEQ ID NO: 2128 - RNA, 22 nt, Mus musculus
accaucgaccguugauuguacc

SEQ ID NO: 2129 - RNA, 22 nt, Mus musculus
aacauucauugcugucgguggg

SEQ ID NO: 2130 - RNA, 22 nt, Mus musculus
aacauucaaccugucggugagu

SEQ ID NO: 2131 - RNA, 22 nt, Mus musculus
uuuggcaaugguagaacucaca

SEQ ID NO: 2132 - RNA, 23 nt, Mus musculus
uauggcacugguagaauucacug

SEQ ID NO: 2133 - RNA, 22 nt, Mus musculus
uggacggagaacugauaagggu

SEQ ID NO: 2134 - RNA, 18 nt, Mus musculus
uggagagaaaggcaguuc

SEQ ID NO: 2135 - RNA, 23 nt, Mus musculus
caaagaauucuccuuuugggcuu

SEQ ID NO: 2136 - RNA, 22 nt, Mus musculus
ucgugucuuguguugcagccgg

SEQ ID NO: 2137 - RNA, 22 nt, Mus musculus
caucccuugcaugguggagggu

SEQ ID NO: 2138 - RNA, 23 nt, Mus musculus
gugccuacugagcugauaucagu

SEQ ID NO: 2139 - RNA, 22 nt, Mus musculus
ugauauguuugauauauuaggu

SEQ ID NO: 2140 - RNA, 22 nt, Mus musculus
caacggaaucccaaaagcagcu

SEQ ID NO: 2141 - RNA, 18 nt, Mus musculus
cugaccuaugaauugaca

SEQ ID NO: 2142 - RNA, 21 nt, Mus musculus
aacuggccuacaaagucccag

SEQ ID NO: 2143 - RNA, 22 nt, Mus musculus
uguaacagcaacuccaugugga

SEQ ID NO: 2144 - RNA, 21 nt, Mus musculus
uagcagcacagaaauauuggc

SEQ ID NO: 2145 - RNA, 21 nt, Mus musculus
uagguaguuucauguuguugg

SEQ ID NO: 2146 - RNA, 21 nt, Mus musculus
uagguaguuuccuguuguugg

SEQ ID NO: 2147 - RNA, 23 nt, Mus musculus
cccaguguucagacuaccuguuc

SEQ ID NO: 2148 - RNA, 22 nt, Mus musculus
uacaguagucugcacauugguu

SEQ ID NO: 2149 - RNA, 23 nt, Mus musculus
cccaguguuuagacuaccuguuc

SEQ ID NO: 2150 - RNA, 23 nt, Mus musculus
ugugcaaaucuaugcaaaacuga

SEQ ID NO: 2151 - RNA, 23 nt, Mus musculus
ugugcaaauccaugcaaaacuga

SEQ ID NO: 2152 - RNA, 22 nt, Mus musculus
uaacacugucugguaacgaugu

SEQ ID NO: 2153 - RNA, 23 nt, Mus musculus
uaauacugccugguaaugaugac

SEQ ID NO: 2154 - RNA, 22 nt, Mus musculus
uaauacugccggguaaugaugg

SEQ ID NO: 2155 - RNA, 21 nt, Mus musculus
uacucaguaaggcauuguucu

SEQ ID NO: 2156 - RNA, 22 nt, Mus musculus
agagguauagcgcaugggaaga

SEQ ID NO: 2157 - RNA, 21 nt, Mus musculus
ugaaauguuuaggaccacuag

SEQ ID NO: 2158 - RNA, 23 nt, Mus musculus
uucccuuugucauccuaugccug

SEQ ID NO: 2159 - RNA, 22 nt, Mus musculus
uccuucauuccaccggagucug

SEQ ID NO: 2160 - RNA, 22 nt, Mus musculus
uggaauguaaggaagugugugg

SEQ ID NO: 2161 - RNA, 23 nt, Mus musculus
gcuucuccuggcucuccucccuc

SEQ ID NO: 2162 - RNA, 22 nt, Mus musculus
auaagacgagcaaaaagcuugu

SEQ ID NO: 2163 - RNA, 23 nt, Mus musculus
uaaagugcuuauagugcagguag

SEQ ID NO: 2164 - RNA, 22 nt, Mus musculus
caaagugcucauagugcaggua

SEQ ID NO: 2165 - RNA, 22 nt, Mus musculus
uagcuuaucagacugauguuga

SEQ ID NO: 2166 - RNA, 22 nt, Mus musculus
cugugcgugugacagcggcuga

SEQ ID NO: 2167 - RNA, 22 nt, Mus musculus
uucccuuugucauccuuugccu

SEQ ID NO: 2168 - RNA, 21 nt, Mus musculus
uaacagucuccagucacggcc

SEQ ID NO: 2169 - RNA, 21 nt, Mus musculus
acagcaggcacagacaggcag

SEQ ID NO: 2170 - RNA, 21 nt, Mus musculus
augaccuaugauuugacagac

SEQ ID NO: 2171 - RNA, 21 nt, Mus musculus
uaaucucagcuggcaacugug

SEQ ID NO: 2172 - RNA, 25 nt, Mus musculus
gggaaaucucugcaggcaaauguga

SEQ ID NO: 2173 - RNA, 24 nt, Mus musculus
uacugcaucaggaacugacuggau

SEQ ID NO: 2174 - RNA, 21 nt, Mus musculus
uugugcuugaucuaaccaugu

SEQ ID NO: 2175 - RNA, 21 nt, Mus musculus
ugauuguccaaacgcaauucu

SEQ ID NO: 2176 - RNA, 22 nt, Mus musculus
aagcugccaguugaagaacugu

SEQ ID NO: 2177 - RNA, 22 nt, Mus musculus
agcuacauugucugcuggguuu

SEQ ID NO: 2178 - RNA, 24 nt, Mus musculus
agcuacaucuggcuacugggucuc

SEQ ID NO: 2179 - RNA, 21 nt, Mus musculus
ugucaguuugucaaauacccc

SEQ ID NO: 2180 - RNA, 23 nt, Mus musculus
uaagucacuagugguuccguuua

SEQ ID NO: 2181 - RNA, 21 nt, Mus musculus
aucacauugccagggauuucc

SEQ ID NO: 2182 - RNA, 21 nt, Mus musculus
aucacauugccagggauuacc

SEQ ID NO: 2183 - RNA, 22 nt, Mus musculus
uggcucaguucagcaggaacag

SEQ ID NO: 2184 - RNA, 22 nt, Mus musculus
cauugcacuugucucggucuga

SEQ ID NO: 2185 - RNA, 21 nt, Mus musculus
uucaaguaauccaggauaggc

SEQ ID NO: 2186 - RNA, 22 nt, Mus musculus
uucaaguaauucaggauagguu

SEQ ID NO: 2187 - RNA, 21 nt, Mus musculus
uucacaguggcuaaguuccgc

SEQ ID NO: 2188 - RNA, 21 nt, Mus musculus
uucacaguggcuaaguucugc

SEQ ID NO: 2189 - RNA, 22 nt, Mus musculus
aaggagcucacagucuauugag

SEQ ID NO: 2190 - RNA, 23 nt, Mus musculus
cucaaacuaugggggcacuuuuu

SEQ ID NO: 2191 - RNA, 23 nt, Mus musculus
aaagugcuuccacuuugugugcc

SEQ ID NO: 2192 - RNA, 22 nt, Mus musculus
caucaaaguggaggcccucucu

SEQ ID NO: 2193 - RNA, 23 nt, Mus musculus
aaagugcauccauuuuguuuguc

SEQ ID NO: 2194 - RNA, 21 nt, Mus musculus
gaucaaaguggaggcccucuc

SEQ ID NO: 2195 - RNA, 23 nt, Mus musculus
aagugccgccagguuuugagugu

SEQ ID NO: 2196 - RNA, 22 nt, Mus musculus
acucaaacugggggcucuuuug

SEQ ID NO: 2197 - RNA, 22 nt, Mus musculus
agugccgcagaguuuguagugu

SEQ ID NO: 2198 - RNA, 22 nt, Mus musculus
aaagugcuucccuuuugugugu

SEQ ID NO: 2199 - RNA, 23 nt, Mus musculus
aaagugcuacuacuuuugagucu

SEQ ID NO: 2200 - RNA, 21 nt, Mus musculus
agggcccccccucaauccugu

SEQ ID NO: 2201 - RNA, 21 nt, Mus musculus
auguaugugugcaugugcaug

SEQ ID NO: 2202 - RNA, 22 nt, Mus musculus
auguaugugugcaugaacaugu

SEQ ID NO: 2203 - RNA, 22 nt, Mus musculus
ggcagaggagggcuguucuucc

SEQ ID NO: 2204 - RNA, 22 nt, Mus musculus
ugguuuaccgucccacauacau

SEQ ID NO: 2205 - RNA, 21 nt, Mus musculus
uagcaccaucugaaaucgguu

SEQ ID NO: 2206 - RNA, 23 nt, Mus musculus
uagcaccauuugaaaucaguguu

SEQ ID NO: 2207 - RNA, 20 nt, Mus musculus
uagcaccauuugaaaucggu

SEQ ID NO: 2208 - RNA, 22 nt, Mus musculus
uaugcaagggcaagcucucuuc

SEQ ID NO: 2209 - RNA, 23 nt, Mus musculus
cagugcaauaguauugucaaagc

SEQ ID NO: 2210 - RNA, 24 nt, Mus musculus
cagugcaaugguauugucaaagca

SEQ ID NO: 2211 - RNA, 23 nt, Mus musculus
uaagugcuuccauguuuugguga

SEQ ID NO: 2212 - RNA, 22 nt, Mus musculus
aagugcuuccauguuuuaguag

SEQ ID NO: 2213 - RNA, 23 nt, Mus musculus
acuuuaacaugggaaugcuuucu

SEQ ID NO: 2214 - RNA, 23 nt, Mus musculus
caagugcuuccauguuucagugg

SEQ ID NO: 2215 - RNA, 22 nt, Mus musculus
uuuaacaugggguuaccugcug

SEQ ID NO: 2216 - RNA, 22 nt, Mus musculus
aagugcuuccauguuugagugu

SEQ ID NO: 2217 - RNA, 22 nt, Mus musculus
cuuucagucggauguuugcagc

SEQ ID NO: 2218 - RNA, 22 nt, Mus musculus
uguaaacauccucgacuggaag

SEQ ID NO: 2219 - RNA, 22 nt, Mus musculus
uguaaacauccuacacucagcu

SEQ ID NO: 2220 - RNA, 23 nt, Mus musculus
uguaaacauccuacacucucagc

SEQ ID NO: 2221 - RNA, 22 nt, Mus musculus
uguaaacauccccgacuggaag

SEQ ID NO: 2222 - RNA, 20 nt, Mus musculus
uguaaacauccuugacugga

SEQ ID NO: 2223 - RNA, 21 nt, Mus musculus
cuuucagucggauguuuacag

SEQ ID NO: 2224 - RNA, 22 nt, Mus musculus
aggcaagaugcuggcauagcug

SEQ ID NO: 2225 - RNA, 21 nt, Mus musculus
uauugcacauuacuaaguugc

SEQ ID NO: 2226 - RNA, 23 nt, Mus musculus
aaaagcuggguugagagggcgaa

SEQ ID NO: 2227 - RNA, 20 nt, Mus musculus
aaacaugaagcgcugcaaca

SEQ ID NO: 2228 - RNA, 22 nt, Mus musculus
gcacauuacacggucgaccucu

SEQ ID NO: 2229 - RNA, 22 nt, Mus musculus
ccacugccccaggugcugcugg

SEQ ID NO: 2230 - RNA, 22 nt, Mus musculus
cgcauccccuagggcauuggug

SEQ ID NO: 2231 - RNA, 23 nt, Mus musculus
ccuaguaggugcucaguaagugu

SEQ ID NO: 2232 - RNA, 21 nt, Mus musculus
ccucugggcccuuccuccagu

SEQ ID NO: 2233 - RNA, 22 nt, Mus musculus
cuggcccucucugcccuuccgu

SEQ ID NO: 2234 - RNA, 22 nt, Mus musculus
aacacacccagcuaaccuuuuu

SEQ ID NO: 2235 - RNA, 19 nt, Mus musculus
gugcauuguaguugcauug

SEQ ID NO: 2236 - RNA, 23 nt, Mus musculus
gcaaagcacagggccugcagaga

SEQ ID NO: 2237 - RNA, 21 nt, Mus musculus
gccccugggccuauccuagaa

SEQ ID NO: 2238 - RNA, 23 nt, Mus musculus
ucaagagcaauaacgaaaaaugu

SEQ ID NO: 2239 - RNA, 23 nt, Mus musculus
uucagcuccuauaugaugccuuu

SEQ ID NO: 2240 - RNA, 23 nt, Mus musculus
uccagcaucagugauuuuguuga

SEQ ID NO: 2241 - RNA, 21 nt, Mus musculus
ucccuguccuccaggagcuca

SEQ ID NO: 2242 - RNA, 23 nt, Mus musculus
uccgucucaguuacuuuauagcc

SEQ ID NO: 2243 - RNA, 21 nt, Mus musculus
ucgaucggucggucggucagu

SEQ ID NO: 2244 - RNA, 24 nt, Mus musculus
ucucacacagaaaucgcacccguc

SEQ ID NO: 2245 - RNA, 23 nt, Mus musculus
ugaucuagccaaagccugacugu

SEQ ID NO: 2246 - RNA, 21 nt, Mus musculus
ugcugaccccuaguccagugc

SEQ ID NO: 2247 - RNA, 23 nt, Mus musculus
ugucugcccgagugccugccucu

SEQ ID NO: 2248 - RNA, 23 nt, Mus musculus
uggcagugucuuagcugguuguu

SEQ ID NO: 2249 - RNA, 23 nt, Mus musculus
uaggcaguguaauuagcugauug

SEQ ID NO: 2250 - RNA, 23 nt, Mus musculus
aggcaguguaguuagcugauugc

SEQ ID NO: 2251 - RNA, 23 nt, Mus musculus
uucacaaagcccauacacuuuca

SEQ ID NO: 2252 - RNA, 24 nt, Mus musculus
ucccugaggagcccuuugagccug

SEQ ID NO: 2253 - RNA, 22 nt, Mus musculus
uuaucagaaucuccagggguac

SEQ ID NO: 2254 - RNA, 23 nt, Mus musculus
aauccuuggaaccuaggugugaa

SEQ ID NO: 2255 - RNA, 22 nt, Mus musculus
auugcacgguauccaucuguaa

SEQ ID NO: 2256 - RNA, 22 nt, Mus musculus
uaaugccccuaaaaauccuuau

SEQ ID NO: 2257 - RNA, 21 nt, Mus musculus
aauugcacuuuagcaauggug

SEQ ID NO: 2258 - RNA, 20 nt, Mus musculus
aauaauacaugguugaucuu

SEQ ID NO: 2259 - RNA, 21 nt, Mus musculus
agaucgaccguguuauauucg

SEQ ID NO: 2260 - RNA, 23 nt, Mus musculus
gccugcugggguggaaccugguu

SEQ ID NO: 2261 - RNA, 22 nt, Mus musculus
gguuguauuaucauuguccgag

SEQ ID NO: 2262 - RNA, 22 nt, Mus musculus
auauaauacaaccugcuaagug

SEQ ID NO: 2263 - RNA, 22 nt, Mus musculus
uuuguucguucggcucgcguga

SEQ ID NO: 2264 - RNA, 21 nt, Mus musculus
aucguagaggaaaauccacgu

SEQ ID NO: 2265 - RNA, 21 nt, Mus musculus
gguagauucuccuucuaugag

SEQ ID NO: 2266 - RNA, 22 nt, Mus musculus
aucauagaggaacauccacuuu

SEQ ID NO: 2267 - RNA, 21 nt, Mus musculus
guggauauuccuucuaugguu

SEQ ID NO: 2268 - RNA, 20 nt, Mus musculus
aacauagaggaaauuucacg

SEQ ID NO: 2269 - RNA, 22 nt, Mus musculus
aucacacaaaggcaacuuuugu

SEQ ID NO: 2270 - RNA, 22 nt, Mus musculus
cuccugacuccagguccugugu

SEQ ID NO: 2271 - RNA, 21 nt, Mus musculus
ugguagacuauggaacguagg

SEQ ID NO: 2272 - RNA, 22 nt, Mus musculus
uauguaguaugguccacaucuu

SEQ ID NO: 2273 - RNA, 22 nt, Mus musculus
ugguugaccauagaacaugcgc

SEQ ID NO: 2274 - RNA, 22 nt, Mus musculus
uauacaagggcaagcucucugu

SEQ ID NO: 2275 - RNA, 22 nt, Mus musculus
gaaguuguucgugguggauucg

SEQ ID NO: 2276 - RNA, 22 nt, Mus musculus
agaucagaaggugacuguggcu

SEQ ID NO: 2277 - RNA, 20 nt, Mus musculus
auuccuagaaauuguucaca

SEQ ID NO: 2278 - RNA, 23 nt, Mus musculus
gaauguugcucggugaaccccuu

SEQ ID NO: 2279 - RNA, 22 nt, Mus musculus
aauauaacacagauggccuguu

SEQ ID NO: 2280 - RNA, 23 nt, Mus musculus
aacacgguccacuaacccucagu

SEQ ID NO: 2281 - RNA, 23 nt, Mus musculus
acuucaccugguccacuagccgu

SEQ ID NO: 2282 - RNA, 22 nt, Mus musculus
cuggacuuggagucagaaggcc

SEQ ID NO: 2283 - RNA, 22 nt, Mus musculus
agcucggucugaggccccucag

SEQ ID NO: 2284 - RNA, 22 nt, Mus musculus
cagcagcaauucauguuuugga

SEQ ID NO: 2285 - RNA, 21 nt, Mus musculus
aucgggaaugucguguccgcc

SEQ ID NO: 2286 - RNA, 22 nt, Mus musculus
uaauacugucugguaaugccgu

SEQ ID NO: 2287 - RNA, 23 nt, Mus musculus
ugucuugcaggccgucaugcagg

SEQ ID NO: 2288 - RNA, 22 nt, Mus musculus
aucaugaugggcuccucggugu

SEQ ID NO: 2289 - RNA, 22 nt, Mus musculus
uacggugagccugucauuauuc

SEQ ID NO: 2290 - RNA, 21 nt, Mus musculus
uuugaaccaucacucgacucc

SEQ ID NO: 2291 - RNA, 22 nt, Mus musculus
agcucgacucaugguuugaacc

SEQ ID NO: 2292 - RNA, 22 nt, Mus musculus
uugcauauguaggaugucccau

SEQ ID NO: 2293 - RNA, 22 nt, Mus musculus
uggcaguguauuguuagcuggu

SEQ ID NO: 2294 - RNA, 21 nt, Mus musculus
aggcagugcauugcuagcugg

SEQ ID NO: 2295 - RNA, 22 nt, Mus musculus
uuuuugcgauguguuccuaaua

SEQ ID NO: 2296 - RNA, 22 nt, Mus musculus
uuuugcaguauguuccugaaua

SEQ ID NO: 2297 - RNA, 22 nt, Mus musculus
auugggaacauuuugcaugcau

SEQ ID NO: 2298 - RNA, 22 nt, Mus musculus
aaaccguuaccauuacugaguu

SEQ ID NO: 2299 - RNA, 22 nt, Mus musculus
uguuugcagaggaaacugagac

SEQ ID NO: 2300 - RNA, 24 nt, Mus musculus
augcaguccacgggcauauacacu

SEQ ID NO: 2301 - RNA, 22 nt, Mus musculus
uaugugccuuuggacuacaucg

SEQ ID NO: 2302 - RNA, 21 nt, Mus musculus
uaccuaauuuguuguccauca

SEQ ID NO: 2303 - RNA, 23 nt, Mus musculus
uaccaaguuuauucugugagaua

SEQ ID NO: 2304 - RNA, 23 nt, Mus musculus
uauuuagaauggcacugauguga

SEQ ID NO: 2305 - RNA, 23 nt, Mus musculus
auacauacacgcacacauaagac

SEQ ID NO: 2306 - RNA, 21 nt, Mus musculus
guaagugccugcauguauaug

SEQ ID NO: 2307 - RNA, 22 nt, Mus musculus
auauacauacacacaccuacac

SEQ ID NO: 2308 - RNA, 22 nt, Mus musculus
auauacauacacacaccaacac

SEQ ID NO: 2309 - RNA, 23 nt, Mus musculus
uaugacugaugugcgugugucug

SEQ ID NO: 2310 - RNA, 26 nt, Mus musculus
ugccucuuucauugaucuuggugucc

SEQ ID NO: 2311 - RNA, 21 nt, Mus musculus
uucuuggacuggcacugguga

SEQ ID NO: 2312 - RNA, 23 nt, Mus musculus
uacguaguauagugcuuuucaca

SEQ ID NO: 2313 - RNA, 23 nt, Mus musculus
ucacuccuccccucccgucuugu

SEQ ID NO: 2314 - RNA, 22 nt, Mus musculus
ucaggcucaguccccucccgau

SEQ ID NO: 2315 - RNA, 22 nt, Mus musculus
agucauacacggcucuccucuc

SEQ ID NO: 2316 - RNA, 22 nt, Mus musculus
agaggcuggccgugaugaauuc

SEQ ID NO: 2317 - RNA, 22 nt, Mus musculus
uccuguacugagcugccccgag

SEQ ID NO: 2318 - RNA, 21 nt, Mus musculus
aaucguacagggucauccacu

SEQ ID NO: 2319 - RNA, 21 nt, Mus musculus
cccagauaauagcacucucaa

SEQ ID NO: 2320 - RNA, 21 nt, Mus musculus
uugaaaggcuguuucuugguc

SEQ ID NO: 2321 - RNA, 23 nt, Mus musculus
aaugacaccacauauauggcagc

SEQ ID NO: 2322 - RNA, 22 nt, Mus musculus
caaccuggaggacuccaugcug

SEQ ID NO: 2323 - RNA, 22 nt, Mus musculus
aguggggaacccuuccaugagg

SEQ ID NO: 2324 - RNA, 21 nt, Mus musculus
ugaaacauacacgggaaaccu

SEQ ID NO: 2325 - RNA, 22 nt, Mus musculus
aaacaaacauggugcacuucuu

SEQ ID NO: 2326 - RNA, 22 nt, Mus musculus
ugaguauuacauggccaaucuc

SEQ ID NO: 2327 - RNA, 22 nt, Mus musculus
cagcagcacacugugguuugua

SEQ ID NO: 2328 - RNA, 21 nt, Mus musculus
uuaagacuugcagugauguuu

SEQ ID NO: 2329 - RNA, 22 nt, Mus musculus
augcaccugggcaaggguucag

SEQ ID NO: 2330 - RNA, 22 nt, Mus musculus
aauccuuugucccugggugaaa

SEQ ID NO: 2331 - RNA, 22 nt, Mus musculus
aaugcacccgggcaaggauuug

SEQ ID NO: 2332 - RNA, 21 nt, Mus musculus
uagcagcgggaacaguacugc

SEQ ID NO: 2333 - RNA, 22 nt, Mus musculus
cgucaacacuugcugguuuucu

SEQ ID NO: 2334 - RNA, 22 nt, Mus musculus
caugccuugaguguaggaccgu

SEQ ID NO: 2335 - RNA, 22 nt, Mus musculus
ggagaaauuauccuuggugugu

SEQ ID NO: 2336 - RNA, 20 nt, Mus musculus
aggucagaggucgauccugg

SEQ ID NO: 2337 - RNA, 23 nt, Mus musculus
aagggauucugauguuggucaca

SEQ ID NO: 2338 - RNA, 22 nt, Mus musculus
ugugacagauugauaacugaaa

SEQ ID NO: 2339 - RNA, 21 nt, Mus musculus
cucggggaucaucaugucacg

SEQ ID NO: 2340 - RNA, 21 nt, Mus musculus
aaacauucgcggugcacuucu

SEQ ID NO: 2341 - RNA, 16 nt, Mus musculus
augguggcacggaguc

SEQ ID NO: 2342 - RNA, 20 nt, Mus musculus
cuugguacaucuuugaguga

SEQ ID NO: 2343 - RNA, 22 nt, Mus musculus
cgacccauacuugguuucagug

SEQ ID NO: 2344 - RNA, 23 nt, Mus musculus
auugugucaauaugcgaugaugu

SEQ ID NO: 2345 - RNA, 22 nt, Mus musculus
uccgagccugggucucccucuu

SEQ ID NO: 2346 - RNA, 23 nt, Mus musculus
aauggcgccacuaggguugugca

SEQ ID NO: 2347 - RNA, 22 nt, Mus musculus
accaggaggcugaggucccuua

SEQ ID NO: 2348 - RNA, 22 nt, Mus musculus
agcgggcacagcugugagagcc

SEQ ID NO: 2349 - RNA, 23 nt, Mus musculus
ugacaccugccacccagcccaag

SEQ ID NO: 2350 - RNA, 24 nt, Mus musculus
ugucacucggcucggcccacuacc

SEQ ID NO: 2351 - RNA, 22 nt, Mus musculus
aguugugugugcauguucaugu

SEQ ID NO: 2352 - RNA, 22 nt, Mus musculus
aguuuugugugcaugugcaugu

SEQ ID NO: 2353 - RNA, 22 nt, Mus musculus
auaguuguguguggaugugugu

SEQ ID NO: 2354 - RNA, 22 nt, Mus musculus
aucccugaguguauguggugaa

SEQ ID NO: 2355 - RNA, 24 nt, Mus musculus
aggaagcccuggaggggcuggagg

SEQ ID NO: 2356 - RNA, 22 nt, Mus musculus
ugagguugguguacugugugug

SEQ ID NO: 2357 - RNA, 22 nt, Mus musculus
cucacagcucugguccuuggag

SEQ ID NO: 2358 - RNA, 22 nt, Mus musculus
gcacugagaugggaguggugua

SEQ ID NO: 2359 - RNA, 22 nt, Mus musculus
cacagcucccaucucagaacaa

SEQ ID NO: 2360 - RNA, 22 nt, Mus musculus
cuguaugcccuaaccgcucagu

SEQ ID NO: 2361 - RNA, 22 nt, Mus musculus
uggugcggaaagggcccacagu

SEQ ID NO: 2362 - RNA, 21 nt, Mus musculus
ccguccugagguuguugagcu

SEQ ID NO: 2363 - RNA, 22 nt, Mus musculus
acucuacaaccuuaggacuugc

SEQ ID NO: 2364 - RNA, 22 nt, Mus musculus
uucagugaugauuagcuucuga

SEQ ID NO: 2365 - RNA, 22 nt, Mus musculus
gucucggugcaaggacuggagg

SEQ ID NO: 2366 - RNA, 22 nt, Mus musculus
ggacugugaggugacucuuggu

SEQ ID NO: 2367 - RNA, 21 nt, Mus musculus
gggcaucugcugacauggggg

SEQ ID NO: 2368 - RNA, 21 nt, Mus musculus
cagccucgcuggcaggcagcu

SEQ ID NO: 2369 - RNA, 21 nt, Mus musculus
cugcagucacagugaagucug

SEQ ID NO: 2370 - RNA, 21 nt, Mus musculus
ccugcuguaagcuguguccuc

SEQ ID NO: 2371 - RNA, 19 nt, Mus musculus
aguuuucccuucaagucaa

SEQ ID NO: 2372 - RNA, 21 nt, Mus musculus
ucaauggcugaggugaggcac

SEQ ID NO: 2373 - RNA, 22 nt, Mus musculus
auugcuucccagacggugaaga

SEQ ID NO: 2374 - RNA, 22 nt, Mus musculus
cuauccuggaaugcagcaauga

SEQ ID NO: 2375 - RNA, 20 nt, Mus musculus
ucgcaggcgacuacuuauuc

SEQ ID NO: 2376 - RNA, 21 nt, Mus musculus
cguccccgcucggcggggucc

SEQ ID NO: 2377 - RNA, 22 nt, Mus musculus
aaaggcuaggcucacaaccaaa

SEQ ID NO: 2378 - RNA, 22 nt, Mus musculus
auuccugaagagaggcagaaaa

SEQ ID NO: 2379 - RNA, 21 nt, Mus musculus
aucucuuugagcgccucacuc

SEQ ID NO: 2380 - RNA, 23 nt, Mus musculus
gcagcuuucagauguggcuguaa

SEQ ID NO: 2381 - RNA, 21 nt, Mus musculus
cagccacauccgaaaguuuuc

SEQ ID NO: 2382 - RNA, 19 nt, Mus musculus
cugaaaauguugccugaag

SEQ ID NO: 2383 - RNA, 22 nt, Mus musculus
agauugggcauaggugacugaa

SEQ ID NO: 2384 - RNA, 18 nt, Mus musculus
gcgugugcuugcuguggg

SEQ ID NO: 2385 - RNA, 21 nt, Mus musculus
aacauccugguccuguggaga

SEQ ID NO: 2386 - RNA, 19 nt, Mus musculus
cauucucguuuccuucccu

SEQ ID NO: 2387 - RNA, 20 nt, Mus musculus
aggcagugcgaccuggcucg

SEQ ID NO: 2388 - RNA, 22 nt, Mus musculus
uggaagacuagugauuuuguug

SEQ ID NO: 2389 - RNA, 21 nt, Mus musculus
cacgcgggaaccgaguccacc

SEQ ID NO: 2390 - RNA, 21 nt, Mus musculus
uuagccgcugaaauagaugga

SEQ ID NO: 2391 - RNA, 21 nt, Mus musculus
ugcccacccuuuaccccgcuc

SEQ ID NO: 2392 - RNA, 21 nt, Mus musculus
aaaaccuucagaaggaaagaa

SEQ ID NO: 2393 - RNA, 21 nt, Mus musculus
agacaugugcucugcuccuag

SEQ ID NO: 2394 - RNA, 20 nt, Mus musculus
ggugggagguggggugggca

SEQ ID NO: 2395 - RNA, 22 nt, Mus musculus
agagaaacccugucucaaaaaa

SEQ ID NO: 2396 - RNA, 21 nt, Mus musculus
cagucaugccgcuugccuacg

SEQ ID NO: 2397 - RNA, 21 nt, Mus musculus
caacuagacugugagcuucua

SEQ ID NO: 2398 - RNA, 19 nt, Mus musculus
ggaggcagaggcaggagga

SEQ ID NO: 2399 - RNA, 22 nt, Mus musculus
ccaagucuuggggagaguugag

SEQ ID NO: 2400 - RNA, 22 nt, Mus musculus
gggacccggggagagauguaag

SEQ ID NO: 2401 - RNA, 21 nt, Mus musculus
cuccuucacccgggcgguacc

SEQ ID NO: 2402 - RNA, 22 nt, Mus musculus
ugcgagucacccccggguguug

SEQ ID NO: 2403 - RNA, 19 nt, Mus musculus
ugcacugaaggcacacagc

SEQ ID NO: 2404 - RNA, 21 nt, Mus musculus
cgacgagggccggucggucgc

SEQ ID NO: 2405 - RNA, 21 nt, Mus musculus
cuccgugcacacccccgcgug

SEQ ID NO: 2406 - RNA, 22 nt, Mus musculus
cucagacagagauaccuucucu

SEQ ID NO: 2407 - RNA, 21 nt, Mus musculus
cuuccgcccggccgggugucg

SEQ ID NO: 2408 - RNA, 22 nt, Mus musculus
aucucggcuacagaaaaauguu

SEQ ID NO: 2409 - RNA, 18 nt, Mus musculus
aucucgcuggggccucca

SEQ ID NO: 2410 - RNA, 21 nt, Mus musculus
cagugcaauuaaaagggggaa

SEQ ID NO: 2411 - RNA, 21 nt, Mus musculus
ugcggggcuagggcuaacagc

SEQ ID NO: 2412 - RNA, 19 nt, Mus musculus
uuugugaccugguccacua

SEQ ID NO: 2413 - RNA, 22 nt, Mus musculus
gcagagugcaaacaauuuugac

SEQ ID NO: 2414 - RNA, 27 nt, Mus musculus
gaaauucggcucugggucuguggggag

SEQ ID NO: 2415 - RNA, 22 nt, Mus musculus
gcagcagggugaaacugacaca

SEQ ID NO: 2416 - RNA, 22 nt, Mus musculus
ggggcuggggccgggacagagc

SEQ ID NO: 2417 - RNA, 22 nt, Mus musculus
ccagcugggaagaaccaguggc

SEQ ID NO: 2418 - RNA, 22 nt, Mus musculus
aggaggccauaguggcaacugu

SEQ ID NO: 2419 - RNA, 19 nt, Mus musculus
ggugcucacauguccuccu

SEQ ID NO: 2420 - RNA, 22 nt, Mus musculus
cgugggccugacguggagcugg

SEQ ID NO: 2421 - RNA, 21 nt, Mus musculus
uggaagacuugugauuuuguu

SEQ ID NO: 2422 - RNA, 24 nt, Mus musculus
gauugcugugcgugcggaaucgac

SEQ ID NO: 2423 - RNA, 22 nt, Mus musculus
ucaguaacaaagauucauccuu

SEQ ID NO: 2424 - RNA, 22 nt, Mus musculus
ugugaguuguuccucaccugga

SEQ ID NO: 2425 - RNA, 20 nt, Mus musculus
gaauugaucaggacauaggg

SEQ ID NO: 2426 - RNA, 22 nt, Mus musculus
ucuuugguuaucuagcuguaug

SEQ ID NO: 2427 - RNA, 21 nt, Mus musculus
uaaagcuagauaaccgaaagu

SEQ ID NO: 2428 - RNA, 21 nt, Mus musculus
uauugcacuugucccggccug

SEQ ID NO: 2429 - RNA, 23 nt, Mus musculus
caaagugcuguucgugcagguag

SEQ ID NO: 2430 - RNA, 23 nt, Mus musculus
uuuggcacuagcacauuuuugcu

SEQ ID NO: 2431 - RNA, 22 nt, Mus musculus
ugagguaguaaguuguauuguu

SEQ ID NO: 2432 - RNA, 20 nt, Mus musculus
acccguagauccgaucuugu

SEQ ID NO: 2433 - RNA, 22 nt, Mus musculus
cacccguagaaccgaccuugcg

SEQ ID NO: 2434 - RNA, 22 nt, Macaca nemestrina
uacaguacugugauaacugaag

SEQ ID NO: 2435 - RNA, 23 nt, Macaca nemestrina
agcagcauuguacagggcuauga

SEQ ID NO: 2436 - RNA, 20 nt, Macaca nemestrina
ucaaaugcucagacuccugu

SEQ ID NO: 2437 - RNA, 24 nt, Macaca nemestrina
aaaagugcuuacagugcagguagc

SEQ ID NO: 2438 - RNA, 21 nt, Macaca nemestrina
uaaagugcugacagugcagau

SEQ ID NO: 2439 - RNA, 23 nt, Macaca nemestrina
agcagcauuguacagggcuauca

SEQ ID NO: 2440 - RNA, 22 nt, Macaca nemestrina
uacccuguagaaccgaauuugu

SEQ ID NO: 2441 - RNA, 22 nt, Macaca nemestrina
ucccugagacccuaacuuguga

SEQ ID NO: 2442 - RNA, 22 nt, Macaca nemestrina
ucggauccgucugagcuuggcu

SEQ ID NO: 2443 - RNA, 20 nt, Macaca nemestrina
cagugcaauguuaaaagggc

SEQ ID NO: 2444 - RNA, 22 nt, Macaca nemestrina
uugguccccuucaaccagcugu

SEQ ID NO: 2445 - RNA, 21 nt, Macaca nemestrina
ugugacugguugaccagaggg

SEQ ID NO: 2446 - RNA, 21 nt, Macaca nemestrina
agugguucuacccuaugguag

SEQ ID NO: 2447 - RNA, 22 nt, Macaca nemestrina
uacaguauagaugauguacuag

SEQ ID NO: 2448 - RNA, 24 nt, Macaca nemestrina
guccaguuuucccaggaaucccuu

SEQ ID NO: 2449 - RNA, 20 nt, Macaca nemestrina
guguguggaaaugcuucugc

SEQ ID NO: 2450 - RNA, 20 nt, Macaca nemestrina
uugcauagucacaaaaguga

SEQ ID NO: 2451 - RNA, 22 nt, Macaca nemestrina
uagguuauccguguugccuucg

SEQ ID NO: 2452 - RNA, 22 nt, Macaca nemestrina
uagcagcacauaaugguuugug

SEQ ID NO: 2453 - RNA, 22 nt, Macaca nemestrina
uagcagcacaucaugguuuaca

SEQ ID NO: 2454 - RNA, 22 nt, Macaca nemestrina
uagcagcacguaaauauuggcg

SEQ ID NO: 2455 - RNA, 20 nt, Macaca nemestrina
acugcagugaaggcacuugu

SEQ ID NO: 2456 - RNA, 24 nt, Macaca nemestrina
caaagugcuuacagugcagguagu

SEQ ID NO: 2457 - RNA, 22 nt, Macaca nemestrina
uaaggugcaucuagugcagaua

SEQ ID NO: 2458 - RNA, 23 nt, Macaca nemestrina
aacauucaacgcugucggugagu

SEQ ID NO: 2459 - RNA, 22 nt, Macaca nemestrina
accaucgaccguugauuguacc

SEQ ID NO: 2460 - RNA, 24 nt, Macaca nemestrina
aacauucauugcugucgguggguu

SEQ ID NO: 2461 - RNA, 23 nt, Macaca nemestrina
uauggcacugguagaauucacug

SEQ ID NO: 2462 - RNA, 22 nt, Macaca nemestrina
uggacggagaacugauaagggu

SEQ ID NO: 2463 - RNA, 21 nt, Macaca nemestrina
ucgugucuuguguugcagccg

SEQ ID NO: 2464 - RNA, 22 nt, Macaca nemestrina
caucccuugcaugguggagggu

SEQ ID NO: 2465 - RNA, 23 nt, Macaca nemestrina
gugccuacugagcugauaucagu

SEQ ID NO: 2466 - RNA, 22 nt, Macaca nemestrina
uguaacagcaacuccaugugga

SEQ ID NO: 2467 - RNA, 22 nt, Macaca nemestrina
uucaccaccuucuccacccggc

SEQ ID NO: 2468 - RNA, 19 nt, Macaca nemestrina
gguccagaggggaaauagg

SEQ ID NO: 2469 - RNA, 23 nt, Macaca nemestrina
cccaguguucagacuaccuguuc

SEQ ID NO: 2470 - RNA, 23 nt, Macaca nemestrina
ugugcaaaucuaugcaaaacuga

SEQ ID NO: 2471 - RNA, 23 nt, Macaca nemestrina
ugugcaaauccaugcaaaacuga

SEQ ID NO: 2472 - RNA, 22 nt, Macaca nemestrina
uaaagugcuuauagugcaggua

SEQ ID NO: 2473 - RNA, 22 nt, Macaca nemestrina
uucccuuugucauccuaugccu

SEQ ID NO: 2474 - RNA, 22 nt, Macaca nemestrina
uccuucauuccaccggagucug

SEQ ID NO: 2475 - RNA, 22 nt, Macaca nemestrina
uggaauguaaggaagugugugg

SEQ ID NO: 2476 - RNA, 22 nt, Macaca nemestrina
uagcuuaucagacugauguuga

SEQ ID NO: 2477 - RNA, 22 nt, Macaca nemestrina
uucccuuugucauccuucgccu

SEQ ID NO: 2478 - RNA, 21 nt, Macaca nemestrina
acagcaggcacagacaggcag

SEQ ID NO: 2479 - RNA, 21 nt, Macaca nemestrina
augaccuaugaauugacagac

SEQ ID NO: 2480 - RNA, 21 nt, Macaca nemestrina
uugugcuugaucuaaccaugu

SEQ ID NO: 2481 - RNA, 22 nt, Macaca nemestrina
aagcugccaguugaagaacugu

SEQ ID NO: 2482 - RNA, 22 nt, Macaca nemestrina
ccaccaccaugucugacacuuu

SEQ ID NO: 2483 - RNA, 23 nt, Macaca nemestrina
caagucacuagugguuccguuua

SEQ ID NO: 2484 - RNA, 21 nt, Macaca nemestrina
aucacauugccagggauuucc

SEQ ID NO: 2485 - RNA, 22 nt, Macaca nemestrina
uggcucaguucagcaggaacag

SEQ ID NO: 2486 - RNA, 22 nt, Macaca nemestrina
cauugcacuugucucggucuga

SEQ ID NO: 2487 - RNA, 22 nt, Macaca nemestrina
uucaaguaauccaggauaggcu

SEQ ID NO: 2488 - RNA, 22 nt, Macaca nemestrina
uucacaguggcuaaguuccgcc

SEQ ID NO: 2489 - RNA, 22 nt, Macaca nemestrina
aaggagcucacagucuauugag

SEQ ID NO: 2490 - RNA, 22 nt, Macaca nemestrina
cuagcaccaucugaaaucgguu

SEQ ID NO: 2491 - RNA, 20 nt, Macaca nemestrina
uagcaccauuugaaaucagu

SEQ ID NO: 2492 - RNA, 21 nt, Macaca nemestrina
uguaaacauccuacacucagc

SEQ ID NO: 2493 - RNA, 23 nt, Macaca nemestrina
uguaaacauccuacacucucagc

SEQ ID NO: 2494 - RNA, 22 nt, Macaca nemestrina
uguaaacauccccgacuggaag

SEQ ID NO: 2495 - RNA, 21 nt, Macaca nemestrina
ggcaagaugcuggcauagcug

SEQ ID NO: 2496 - RNA, 21 nt, Macaca nemestrina
uauugcacauuacuaaguugc

SEQ ID NO: 2497 - RNA, 19 nt, Macaca nemestrina
gugcauuguaguugcauug

SEQ ID NO: 2498 - RNA, 22 nt, Macaca nemestrina
uggcagugucuuagcugguugu

SEQ ID NO: 2499 - RNA, 21 nt, Macaca nemestrina
uggaagacuagugauuuuguu

SEQ ID NO: 2500 - RNA, 23 nt, Macaca nemestrina
ucuuugguuaucuagcuguauga

SEQ ID NO: 2501 - RNA, 22 nt, Macaca nemestrina
uauugcacuugucccggccugu

SEQ ID NO: 2502 - RNA, 22 nt, Macaca nemestrina
aaagugcuguucgugcagguag

SEQ ID NO: 2503 - RNA, 22 nt, Macaca nemestrina
uuuggcacuagcacauuuuugc

SEQ ID NO: 2504 - RNA, 22 nt, Macaca nemestrina
aacccguagauccgaucuugug

SEQ ID NO: 2505 - RNA, 21 nt, Medicago truncatula
ugacagaagagagagagcaca

SEQ ID NO: 2506 - RNA, 21 nt, Medicago truncatula
ugccuggcucccuguaugcca

SEQ ID NO: 2507 - RNA, 21 nt, Medicago truncatula
ucgauaaaccucugcauccag

SEQ ID NO: 2508 - RNA, 21 nt, Medicago truncatula
ucggaccaggcuucauucccc

SEQ ID NO: 2509 - RNA, 21 nt, Medicago truncatula
cagccaaggaugacuugccga

SEQ ID NO: 2510 - RNA, 21 nt, Medicago truncatula
cagccaaggaugacuugccga

SEQ ID NO: 2511 - RNA, 21 nt, Medicago truncatula
ugauugagucgugccaauauc

SEQ ID NO: 2512 - RNA, 20 nt, Medicago truncatula
uuggacugaagggagcuccc

SEQ ID NO: 2513 - RNA, 21 nt, Medicago truncatula
uccaaagggaucgcauugauc

SEQ ID NO: 2514 - RNA, 21 nt, Medicago truncatula
augaaguguuugggggaacuc

SEQ ID NO: 2515 - RNA, 21 nt, Medicago truncatula
augaaguauuugggggaacuc

SEQ ID NO: 2516 - RNA, 21 nt, Medicago truncatula
augaaguguuugggggaacuc

SEQ ID NO: 2517 - RNA, 21 nt, Medicago truncatula
augaaguguuugggggaacuc

SEQ ID NO: 2518 - RNA, 21 nt, Medicago truncatula
augaaguguuugggggaacuc

SEQ ID NO: 2519 - RNA, 21 nt, Medicago truncatula
augaaguguuugggggaacuc

SEQ ID NO: 2520 - RNA, 21 nt, Medicago truncatula
uugaaguguuugggggaacuc

SEQ ID NO: 2521 - RNA, 21 nt, Medicago truncatula
augaaguguuugggggaacuu

SEQ ID NO: 2522 - RNA, 21 nt, Medicago truncatula
augaaguguuugggggaacuc

SEQ ID NO: 2523 - RNA, 21 nt, Medicago truncatula
augaaguguuugggggaacuc

SEQ ID NO: 2524 - RNA, 21 nt, Medicago truncatula
augaaguguuugggggaacuc

SEQ ID NO: 2525 - RNA, 21 nt, Medicago truncatula
augaaguguuugggggaacuc

SEQ ID NO: 2526 - RNA, 21 nt, Medicago truncatula
augaaguguuugggggaacuc

SEQ ID NO: 2527 - RNA, 21 nt, Medicago truncatula
augaaguguuugggggaacuc

SEQ ID NO: 2528 - RNA, 21 nt, Medicago truncatula
augaaguguuugggggaacuc

SEQ ID NO: 2529 - RNA, 21 nt, Medicago truncatula
uugaagcguuugggggaacuc

SEQ ID NO: 2530 - RNA, 21 nt, Medicago truncatula
ugccaaaggagauuugcccag

SEQ ID NO: 2531 - RNA, 21 nt, Medicago truncatula
ugccaaaggagagcugcccug

SEQ ID NO: 2532 - RNA, 21 nt, Medicago truncatula
ugccaaaggagauuugcccug

SEQ ID NO: 2533 - RNA, 21 nt, Medicago truncatula
ugccaaaggagagcugcccua

SEQ ID NO: 2534 - RNA, 21 nt, Medicago truncatula
ugccaaaggagauuugcccag

SEQ ID NO: 2535 - RNA, 23 nt, Ovis aries
aucggauccgucugagcuuggcu

SEQ ID NO: 2536 - RNA, 23 nt, Ovis aries
acuccauuuguuuugaugaugga

SEQ ID NO: 2537 - RNA, 23 nt, Ovis aries
ugucuugcaggccgucaugcagg

SEQ ID NO: 2538 - RNA, 23 nt, Ovis aries
ucuuggaguaggucauugggugg

SEQ ID NO: 2539 - RNA, 20 nt, Oryza sativa
ugacagaagagagugagcac

SEQ ID NO: 2540 - RNA, 20 nt, Oryza sativa
ugacagaagagagugagcac

SEQ ID NO: 2541 - RNA, 20 nt, Oryza sativa
ugacagaagagagugagcac

SEQ ID NO: 2542 - RNA, 20 nt, Oryza sativa
ugacagaagagagugagcac

SEQ ID NO: 2543 - RNA, 20 nt, Oryza sativa
ugacagaagagagugagcac

SEQ ID NO: 2544 - RNA, 20 nt, Oryza sativa
ugacagaagagagugagcac

SEQ ID NO: 2545 - RNA, 20 nt, Oryza sativa
ugacagaagagagugagcac

SEQ ID NO: 2546 - RNA, 20 nt, Oryza sativa
ugacagaagagagugagcac

SEQ ID NO: 2547 - RNA, 20 nt, Oryza sativa
ugacagaagagagugagcac

SEQ ID NO: 2548 - RNA, 20 nt, Oryza sativa
ugacagaagagagugagcac

SEQ ID NO: 2549 - RNA, 21 nt, Oryza sativa
ugacagaagagagagagcaca

SEQ ID NO: 2550 - RNA, 21 nt, Oryza sativa
cgacagaagagagugagcaua

SEQ ID NO: 2551 - RNA, 21 nt, Oryza sativa
uuuggauugaagggagcucug

SEQ ID NO: 2552 - RNA, 21 nt, Oryza sativa
uuuggauugaagggagcucug

SEQ ID NO: 2553 - RNA, 21 nt, Oryza sativa
auuggauugaagggagcucca

SEQ ID NO: 2554 - RNA, 21 nt, Oryza sativa
auuggauugaagggagcuccg

SEQ ID NO: 2555 - RNA, 21 nt, Oryza sativa
auuggauugaagggagcuccu

SEQ ID NO: 2556 - RNA, 21 nt, Oryza sativa
cuuggauugaagggagcucua

SEQ ID NO: 2557 - RNA, 21 nt, Oryza sativa
ugccuggcucccuguaugcca

SEQ ID NO: 2558 - RNA, 21 nt, Oryza sativa
ugccuggcucccuguaugcca

SEQ ID NO: 2559 - RNA, 21 nt, Oryza sativa
ugccuggcucccuguaugcca

SEQ ID NO: 2560 - RNA, 21 nt, Oryza sativa
ugccuggcucccuguaugcca

SEQ ID NO: 2561 - RNA, 21 nt, Oryza sativa
ugccuggcucccuguaugccg

SEQ ID NO: 2562 - RNA, 21 nt, Oryza sativa
ugccuggcucccugaaugcca

SEQ ID NO: 2563 - RNA, 21 nt, Oryza sativa
ucgauaaaccucugcauccag

SEQ ID NO: 2564 - RNA, 21 nt, Oryza sativa
ucgauaagccucugcauccag

SEQ ID NO: 2565 - RNA, 21 nt, Oryza sativa
uggagaagcagggcacgugca

SEQ ID NO: 2566 - RNA, 21 nt, Oryza sativa
uggagaagcagggcacgugca

SEQ ID NO: 2567 - RNA, 21 nt, Oryza sativa
uggagaagcaggguacgugca

SEQ ID NO: 2568 - RNA, 21 nt, Oryza sativa
uggagaagcagggcacgugcu

SEQ ID NO: 2569 - RNA, 21 nt, Oryza sativa
uggagaagcagggcacgugag

SEQ ID NO: 2570 - RNA, 21 nt, Oryza sativa
uggagaagcagggcacgugca

SEQ ID NO: 2571 - RNA, 21 nt, Oryza sativa
ucggaccaggcuucauucccc

SEQ ID NO: 2572 - RNA, 21 nt, Oryza sativa
ucggaccaggcuucauucccc

SEQ ID NO: 2573 - RNA, 21 nt, Oryza sativa
ucggaccaggcuucauucccc

SEQ ID NO: 2574 - RNA, 21 nt, Oryza sativa
ucggaccaggcuucauucccc

SEQ ID NO: 2575 - RNA, 21 nt, Oryza sativa
ucgaaccaggcuucauucccc

SEQ ID NO: 2576 - RNA, 21 nt, Oryza sativa
ucggaccaggcuucauucccc

SEQ ID NO: 2577 - RNA, 21 nt, Oryza sativa
ucggaccaggcuucauuccuc

SEQ ID NO: 2578 - RNA, 21 nt, Oryza sativa
ucggaccaggcuucauuccuc

SEQ ID NO: 2579 - RNA, 21 nt, Oryza sativa
ucggaucaggcuucauuccuc

SEQ ID NO: 2580 - RNA, 21 nt, Oryza sativa
ucggaucaggcuucauuccuc

SEQ ID NO: 2581 - RNA, 21 nt, Oryza sativa
ucggaccaggcuucaaucccu

SEQ ID NO: 2582 - RNA, 21 nt, Oryza sativa
ucggaccaggcuucaaucccu

SEQ ID NO: 2583 - RNA, 21 nt, Oryza sativa
ucggaccaggcuucauucccu

SEQ ID NO: 2584 - RNA, 21 nt, Oryza sativa
ucggaccaggcuucauucccc

SEQ ID NO: 2585 - RNA, 21 nt, Oryza sativa
ugaagcugccagcaugaucua

SEQ ID NO: 2586 - RNA, 21 nt, Oryza sativa
ugaagcugccagcaugaucua

SEQ ID NO: 2587 - RNA, 21 nt, Oryza sativa
ugaagcugccagcaugaucua

SEQ ID NO: 2588 - RNA, 21 nt, Oryza sativa
ugaagcugccagcaugaucug

SEQ ID NO: 2589 - RNA, 21 nt, Oryza sativa
ugaagcugccagcaugaucug

SEQ ID NO: 2590 - RNA, 21 nt, Oryza sativa
ugaagcugccagcaugaucug

SEQ ID NO: 2591 - RNA, 21 nt, Oryza sativa
ugaagcugccagcaugaucug

SEQ ID NO: 2592 - RNA, 21 nt, Oryza sativa
ugaagcugccagcaugaucug

SEQ ID NO: 2593 - RNA, 21 nt, Oryza sativa
ugaagcugccagcaugaucug

SEQ ID NO: 2594 - RNA, 21 nt, Oryza sativa
ugaagcugccagcaugaucug

SEQ ID NO: 2595 - RNA, 21 nt, Oryza sativa
ucgcuuggugcagaucgggac

SEQ ID NO: 2596 - RNA, 21 nt, Oryza sativa
aggcuuggugcagcucgggaa

SEQ ID NO: 2597 - RNA, 21 nt, Oryza sativa
cagccaaggaugacuugccga

SEQ ID NO: 2598 - RNA, 21 nt, Oryza sativa
cagccaaggaugacuugccgg

SEQ ID NO: 2599 - RNA, 21 nt, Oryza sativa
cagccaaggaugacuugccgg

SEQ ID NO: 2600 - RNA, 21 nt, Oryza sativa
uagccaaggaugaauugccgg

SEQ ID NO: 2601 - RNA, 21 nt, Oryza sativa
uagccaaggaugacuugccgg

SEQ ID NO: 2602 - RNA, 21 nt, Oryza sativa
uagccaaggaugacuugccua

SEQ ID NO: 2603 - RNA, 21 nt, Oryza sativa
uagccaaggaugacuugccua

SEQ ID NO: 2604 - RNA, 21 nt, Oryza sativa
uagccaaggaugacuugccug

SEQ ID NO: 2605 - RNA, 21 nt, Oryza sativa
uagccaaggaugacuugccug

SEQ ID NO: 2606 - RNA, 21 nt, Oryza sativa
uagccaaggaugacuugccug

SEQ ID NO: 2607 - RNA, 21 nt, Oryza sativa
uagccaaggaugacuugccug

SEQ ID NO: 2608 - RNA, 21 nt, Oryza sativa
uagccaaggaugacuugccug

SEQ ID NO: 2609 - RNA, 21 nt, Oryza sativa
uagccaaggaugacuugccug

SEQ ID NO: 2610 - RNA, 21 nt, Oryza sativa
uagccaagaaugacuugccua

SEQ ID NO: 2611 - RNA, 21 nt, Oryza sativa
uagccaagaaugacuugccua

SEQ ID NO: 2612 - RNA, 22 nt, Oryza sativa
uagccaaggacaaacuugccgg

SEQ ID NO: 2613 - RNA, 21 nt, Oryza sativa
uagccaaggagacugcccaug

SEQ ID NO: 2614 - RNA, 21 nt, Oryza sativa
ugauugagccgcgccaauauc

SEQ ID NO: 2615 - RNA, 21 nt, Oryza sativa
ugauugagccgugccaauauc

SEQ ID NO: 2616 - RNA, 21 nt, Oryza sativa
ugauugagccgugccaauauc

SEQ ID NO: 2617 - RNA, 21 nt, Oryza sativa
ugauugagccgugccaauauc

SEQ ID NO: 2618 - RNA, 21 nt, Oryza sativa
ugauugagccgugccaauauc

SEQ ID NO: 2619 - RNA, 21 nt, Oryza sativa
ugauugagccgugccaauauc

SEQ ID NO: 2620 - RNA, 21 nt, Oryza sativa
gaggugagccgagccaauauc

SEQ ID NO: 2621 - RNA, 21 nt, Oryza sativa
gugagccgaaccaauaucacu

SEQ ID NO: 2622 - RNA, 21 nt, Oryza sativa
ggauugagccgcgucaauauc

SEQ ID NO: 2623 - RNA, 21 nt, Oryza sativa
agaaucuugaugaugcugcau

SEQ ID NO: 2624 - RNA, 21 nt, Oryza sativa
ggaaucuugaugaugcugcau

SEQ ID NO: 2625 - RNA, 21 nt, Oryza sativa
ugaaucuugaugaugcugcac

SEQ ID NO: 2626 - RNA, 21 nt, Oryza sativa
agaaucuugaugaugcugcau

SEQ ID NO: 2627 - RNA, 20 nt, Oryza sativa
uuggacugaagggugcuccc

SEQ ID NO: 2628 - RNA, 20 nt, Oryza sativa
uuggacugaagggugcuccc

SEQ ID NO: 2629 - RNA, 21 nt, Oryza sativa
aagcucaggagggauagcgcc

SEQ ID NO: 2630 - RNA, 21 nt, Oryza sativa
uccaaagggaucgcauugauc

SEQ ID NO: 2631 - RNA, 22 nt, Oryza sativa
uccaaagggaucgcauugaucu

SEQ ID NO: 2632 - RNA, 20 nt, Oryza sativa
uuggcauucuguccaccucc

SEQ ID NO: 2633 - RNA, 21 nt, Oryza sativa
gugaagugcuugggggaacuc

SEQ ID NO: 2634 - RNA, 21 nt, Oryza sativa
gugaaguguuugggggaacuc

SEQ ID NO: 2635 - RNA, 21 nt, Oryza sativa
gugaaguguuuggaggaacuc

SEQ ID NO: 2636 - RNA, 21 nt, Oryza sativa
gugaaguguuugggggaacuc

SEQ ID NO: 2637 - RNA, 21 nt, Oryza sativa
gugaaguguuugggggaacuc

SEQ ID NO: 2638 - RNA, 21 nt, Oryza sativa
gugaauuguuugggggaacuc

SEQ ID NO: 2639 - RNA, 21 nt, Oryza sativa
gugaaguguuugggggaacuc

SEQ ID NO: 2640 - RNA, 21 nt, Oryza sativa
gugaaguguuugggggaacuc

SEQ ID NO: 2641 - RNA, 21 nt, Oryza sativa
gugaaguguuugggggaacuc

SEQ ID NO: 2642 - RNA, 21 nt, Oryza sativa
gugaaguguuugggggaacuc

SEQ ID NO: 2643 - RNA, 21 nt, Oryza sativa
gugaaguguuugggggaacuc

SEQ ID NO: 2644 - RNA, 21 nt, Oryza sativa
gugaaguguuugggggaacuc

SEQ ID NO: 2645 - RNA, 21 nt, Oryza sativa
gugaaguguuugggggaacuc

SEQ ID NO: 2646 - RNA, 21 nt, Oryza sativa
gugaaguguuugggggaacuc

SEQ ID NO: 2647 - RNA, 21 nt, Oryza sativa
augaaguguuuggaggaacuc

SEQ ID NO: 2648 - RNA, 21 nt, Oryza sativa
gugaaguguuugggggaacuc

SEQ ID NO: 2649 - RNA, 21 nt, Oryza sativa
gugaaguguuugggggaacuc

SEQ ID NO: 2650 - RNA, 21 nt, Oryza sativa
gugaaguguuugggggaacuc

SEQ ID NO: 2651 - RNA, 21 nt, Oryza sativa
gugaaguguuugggggaacuc

SEQ ID NO: 2652 - RNA, 21 nt, Oryza sativa
gugaaguguuuggggaaacuc

SEQ ID NO: 2653 - RNA, 21 nt, Oryza sativa
gugaagcguuugggggaaauc

SEQ ID NO: 2654 - RNA, 21 nt, Oryza sativa
gugaaguauuuggcggaacuc

SEQ ID NO: 2655 - RNA, 22 nt, Oryza sativa
gugaaguguuugggggauucuc

SEQ ID NO: 2656 - RNA, 21 nt, Oryza sativa
uuccacagcuuucuugaacug

SEQ ID NO: 2657 - RNA, 21 nt, Oryza sativa
uuccacagcuuucuugaacug

SEQ ID NO: 2658 - RNA, 21 nt, Oryza sativa
uuccacagcuuucuugaacuu

SEQ ID NO: 2659 - RNA, 21 nt, Oryza sativa
uccacaggcuuucuugaacug

SEQ ID NO: 2660 - RNA, 21 nt, Oryza sativa
uccacaggcuuucuugaacug

SEQ ID NO: 2661 - RNA, 21 nt, Oryza sativa
ucauugagugcagcguugaug

SEQ ID NO: 2662 - RNA, 21 nt, Oryza sativa
uuauugagugcagcguugaug

SEQ ID NO: 2663 - RNA, 21 nt, Oryza sativa
uguguucucaggucaccccuu

SEQ ID NO: 2664 - RNA, 21 nt, Oryza sativa
uguguucucaggucgccccug

SEQ ID NO: 2665 - RNA, 21 nt, Oryza sativa
ugccaaaggagaauugcccug

SEQ ID NO: 2666 - RNA, 21 nt, Oryza sativa
ugccaaaggagaauugcccug

SEQ ID NO: 2667 - RNA, 21 nt, Oryza sativa
ugccaaaggagaauugcccug

SEQ ID NO: 2668 - RNA, 21 nt, Oryza sativa
ugccaaaggagaguugcccug

SEQ ID NO: 2669 - RNA, 21 nt, Oryza sativa
ugccaaaggagauuugcccag

SEQ ID NO: 2670 - RNA, 21 nt, Oryza sativa
ugccaaaggagauuugcccag

SEQ ID NO: 2671 - RNA, 21 nt, Oryza sativa
ugccaaaggagauuugcccag

SEQ ID NO: 2672 - RNA, 21 nt, Oryza sativa
ugccaaaggagacuugcccag

SEQ ID NO: 2673 - RNA, 21 nt, Oryza sativa
ugccaaaggagagcugcccug

SEQ ID NO: 2674 - RNA, 21 nt, Oryza sativa
ugccaaaggagaguugcccua

SEQ ID NO: 2675 - RNA, 21 nt, Oryza sativa
ugccaaaggaaauuugccccg

SEQ ID NO: 2676 - RNA, 21 nt, Oryza sativa
cugcacugccucuucccuggc

SEQ ID NO: 2677 - RNA, 21 nt, Oryza sativa
cuaguuucacuuguucugcac

SEQ ID NO: 2678 - RNA, 21 nt, Oryza sativa
ucauccucaucaucaucgucc

SEQ ID NO: 2679 - RNA, 21 nt, Oryza sativa
aacagaacagaagcagagcag

SEQ ID NO: 2680 - RNA, 21 nt, Oryza sativa
uguucguccguacacuguuca

SEQ ID NO: 2681 - RNA, 21 nt, Oryza sativa
gaauguagugaauuuguucca

SEQ ID NO: 2682 - RNA, 21 nt, Oryza sativa
uaaugugaugaugaaaugacg

SEQ ID NO: 2683 - RNA, 21 nt, Oryza sativa
ugaugaaugcugacgauguug

SEQ ID NO: 2684 - RNA, 21 nt, Oryza sativa
uaaauuaaucacggaaaugau

SEQ ID NO: 2685 - RNA, 21 nt, Oryza sativa
uuuuggaaguuuguccuuacg

SEQ ID NO: 2686 - RNA, 20 nt, Oryza sativa
uuauccgguauuggaguuga

SEQ ID NO: 2687 - RNA, 21 nt, Oryza sativa
aaaguuagagaaguuugacuu

SEQ ID NO: 2688 - RNA, 21 nt, Oryza sativa
uucccacgcguuauagugaaa

SEQ ID NO: 2689 - RNA, 21 nt, Oryza sativa
ugucgaaccgcgguuguucga

SEQ ID NO: 2690 - RNA, 21 nt, Oryza sativa
ugucgaaccgcgguuguucga

SEQ ID NO: 2691 - RNA, 21 nt, Oryza sativa
ugucgaaccgcgguuguucga

SEQ ID NO: 2692 - RNA, 21 nt, Oryza sativa
ugucgaaccgcgguuguucga

SEQ ID NO: 2693 - RNA, 21 nt, Oryza sativa
ugucgaaccgcgguuguucga

SEQ ID NO: 2694 - RNA, 21 nt, Oryza sativa
ugucgaaccgcgguuguucga

SEQ ID NO: 2695 - RNA, 21 nt, Oryza sativa
ugucgaaccgcgguuguucga

SEQ ID NO: 2696 - RNA, 21 nt, Oryza sativa
ugucgaaccgcgguuguucga

SEQ ID NO: 2697 - RNA, 21 nt, Oryza sativa
ugucgaaccgcgguuguucga

SEQ ID NO: 2698 - RNA, 21 nt, Oryza sativa
ugucgaaccgcgguuguucga

SEQ ID NO: 2699 - RNA, 24 nt, Oryza sativa
agugucuccugaugaucgggacaa

SEQ ID NO: 2700 - RNA, 24 nt, Oryza sativa
uaccaucaauauaaaugugggaaa

SEQ ID NO: 2701 - RNA, 24 nt, Oryza sativa
uaccaucaauauaaaugugggaaa

SEQ ID NO: 2702 - RNA, 24 nt, Oryza sativa
uaccaucaauauaaaugugggaaa

SEQ ID NO: 2703 - RNA, 24 nt, Oryza sativa
ugacguguaaauugcgagacgaau

SEQ ID NO: 2704 - RNA, 22 nt, Oryza sativa
aucacaauacaauaaaucugga

SEQ ID NO: 2705 - RNA, 21 nt, Oryza sativa
uugcugccucaagcuugcugc

SEQ ID NO: 2706 - RNA, 24 nt, Oryza sativa
uaaauuaguguauaaacauccgau

SEQ ID NO: 2707 - RNA, 24 nt, Oryza sativa
uaaauuaguguauaaacauccgau

SEQ ID NO: 2708 - RNA, 24 nt, Oryza sativa
uaaauuaguguauaaacauccgau

SEQ ID NO: 2709 - RNA, 24 nt, Oryza sativa
uaaauuaguguauaaacauccgau

SEQ ID NO: 2710 - RNA, 24 nt, Oryza sativa
uaaauuaguguauaaacauccgau

SEQ ID NO: 2711 - RNA, 24 nt, Oryza sativa
uaaauuaguguauaaacauccgau

SEQ ID NO: 2712 - RNA, 24 nt, Oryza sativa
uaaauuaguguauaaacauccgau

SEQ ID NO: 2713 - RNA, 24 nt, Oryza sativa
uaaauuaguguauaaacauccgau

SEQ ID NO: 2714 - RNA, 24 nt, Oryza sativa
uaaauuaguguauaaacauccgau

SEQ ID NO: 2715 - RNA, 24 nt, Oryza sativa
caucaauaugaauaugggaaaugg

SEQ ID NO: 2716 - RNA, 21 nt, Oryza sativa
uggaaggggcaugcagaggag

SEQ ID NO: 2717 - RNA, 20 nt, Oryza sativa
cuguacccucucucuucuuc

SEQ ID NO: 2718 - RNA, 21 nt, Oryza sativa
aggugcagaggcagaugcaac

SEQ ID NO: 2719 - RNA, 24 nt, Oryza sativa
cucgccggggcugcgugccgccau

SEQ ID NO: 2720 - RNA, 21 nt, Oryza sativa
ugacaacgagagagagcacgc

SEQ ID NO: 2721 - RNA, 22 nt, Oryza sativa
augugcuaaaaagucaacggug

SEQ ID NO: 2722 - RNA, 22 nt, Oryza sativa
augugcuaaaaagucaacggug

SEQ ID NO: 2723 - RNA, 22 nt, Oryza sativa
augugcuaaaaagucaacggug

SEQ ID NO: 2724 - RNA, 22 nt, Oryza sativa
augugcuaaaaagucaacggug

SEQ ID NO: 2725 - RNA, 22 nt, Oryza sativa
augugcuaaaaagucaacggug

SEQ ID NO: 2726 - RNA, 22 nt, Oryza sativa
augugcuaaaaagucaacggug

SEQ ID NO: 2727 - RNA, 22 nt, Oryza sativa
augugcuaaaaagucaacggug

SEQ ID NO: 2728 - RNA, 22 nt, Oryza sativa
augugcuaaaaagucaacggug

SEQ ID NO: 2729 - RNA, 21 nt, Oryza sativa
cgucaucucacaggugaaucc

SEQ ID NO: 2730 - RNA, 21 nt, Oryza sativa
cgucaucucacaggugaaucc

SEQ ID NO: 2731 - RNA, 21 nt, Oryza sativa
cgucaucucacaggugaaucc

SEQ ID NO: 2732 - RNA, 22 nt, Oryza sativa
augaaugugggaaauguaagaa

SEQ ID NO: 2733 - RNA, 22 nt, Oryza sativa
ugaaugugagaaauguuagaau

SEQ ID NO: 2734 - RNA, 22 nt, Oryza sativa
ugaaugugagaaauguuagaau

SEQ ID NO: 2735 - RNA, 22 nt, Oryza sativa
ugaaugugagaaauguuagaau

SEQ ID NO: 2736 - RNA, 22 nt, Oryza sativa
ugaaugugagaaauguuagaau

SEQ ID NO: 2737 - RNA, 22 nt, Oryza sativa
ugaaugugagaaauguuagaau

SEQ ID NO: 2738 - RNA, 22 nt, Oryza sativa
ugaaugugagaaauguuagaau

SEQ ID NO: 2739 - RNA, 22 nt, Oryza sativa
ugaaugugagaaauguuagaau

SEQ ID NO: 2740 - RNA, 22 nt, Oryza sativa
ugaaugugagaaauguuagaau

SEQ ID NO: 2741 - RNA, 21 nt, Oryza sativa
ucauaagcccaccacaugugg

SEQ ID NO: 2742 - RNA, 24 nt, Oryza sativa
accguuagaucgagaaauggacgu

SEQ ID NO: 2743 - RNA, 24 nt, Oryza sativa
accguuagaucgagaaauggacgu

SEQ ID NO: 2744 - RNA, 24 nt, Oryza sativa
accguuagaucgagaaauggacgu

SEQ ID NO: 2745 - RNA, 22 nt, Oryza sativa
gacggacgguuaaacguuggac

SEQ ID NO: 2746 - RNA, 22 nt, Oryza sativa
gacggacgguuaaacguuggac

SEQ ID NO: 2747 - RNA, 22 nt, Oryza sativa
gacggacgguuaaacguuggac

SEQ ID NO: 2748 - RNA, 22 nt, Oryza sativa
gacggacgguuaaacguuggac

SEQ ID NO: 2749 - RNA, 22 nt, Oryza sativa
gacggacgguuaaacguuggac

SEQ ID NO: 2750 - RNA, 22 nt, Oryza sativa
ggguuauggaauggguuuuacc

SEQ ID NO: 2751 - RNA, 22 nt, Oryza sativa
cacuucauaguacaacgaaucu

SEQ ID NO: 2752 - RNA, 22 nt, Oryza sativa
cacuucauaguacaacgaaucu

SEQ ID NO: 2753 - RNA, 22 nt, Oryza sativa
cacuucauaguacaacgaaucu

SEQ ID NO: 2754 - RNA, 21 nt, Oryza sativa
aaggggauugaggagauuggg

SEQ ID NO: 2755 - RNA, 21 nt, Oryza sativa
aaggggauugaggagauuggg

SEQ ID NO: 2756 - RNA, 21 nt, Oryza sativa
aaggggauugaggagauuggg

SEQ ID NO: 2757 - RNA, 20 nt, Oryza sativa
gugacauauuuuacuacaac

SEQ ID NO: 2758 - RNA, 21 nt, Oryza sativa
uccaacuugaggcccgauuga

SEQ ID NO: 2759 - RNA, 22 nt, Oryza sativa
aaucccuuauauuaugggacgg

SEQ ID NO: 2760 - RNA, 22 nt, Oryza sativa
aaucccuuauauuaugggacgg

SEQ ID NO: 2761 - RNA, 22 nt, Oryza sativa
aaucccuuauauuaugggacgg

SEQ ID NO: 2762 - RNA, 22 nt, Oryza sativa
aaucccuuauauuaugggacgg

SEQ ID NO: 2763 - RNA, 22 nt, Oryza sativa
aaucccuuauauuaugggacgg

SEQ ID NO: 2764 - RNA, 22 nt, Oryza sativa
ucagguuauaagacuuucuagc

SEQ ID NO: 2765 - RNA, 22 nt, Oryza sativa
ucagguuauaagacuuucuagc

SEQ ID NO: 2766 - RNA, 22 nt, Oryza sativa
ucagguuauaagacuuucuagc

SEQ ID NO: 2767 - RNA, 22 nt, Oryza sativa
ucagguuauaagacuuucuagc

SEQ ID NO: 2768 - RNA, 22 nt, Oryza sativa
ucagguuauaagacuuucuagc

SEQ ID NO: 2769 - RNA, 22 nt, Oryza sativa
ucagguuauaagacuuucuagc

SEQ ID NO: 2770 - RNA, 22 nt, Oryza sativa
ucagguuauaagacuuucuagc

SEQ ID NO: 2771 - RNA, 22 nt, Oryza sativa
ucagguuauaagacuuucuagc

SEQ ID NO: 2772 - RNA, 22 nt, Oryza sativa
ucagguuauaagacuuucuagc

SEQ ID NO: 2773 - RNA, 22 nt, Oryza sativa
ucagguuauaagacuuucuagc

SEQ ID NO: 2774 - RNA, 22 nt, Oryza sativa
ucagguuauaagacuuucuagc

SEQ ID NO: 2775 - RNA, 21 nt, Oryza sativa
cggccucguggauggaccagg

SEQ ID NO: 2776 - RNA, 21 nt, Oryza sativa
cggccucguggauggaccagg

SEQ ID NO: 2777 - RNA, 21 nt, Oryza sativa
cggccucguggauggaccagg

SEQ ID NO: 2778 - RNA, 24 nt, Oryza sativa
aagucaucaacaaaaaaguugaau

SEQ ID NO: 2779 - RNA, 24 nt, Oryza sativa
aagucaucaacaaaaaaguugaau

SEQ ID NO: 2780 - RNA, 24 nt, Oryza sativa
aagucaucaacaaaaaaguugaau

SEQ ID NO: 2781 - RNA, 21 nt, Pan paniscus
uggaauguaaagaaguaugua

SEQ ID NO: 2782 - RNA, 22 nt, Pan paniscus
aacccguagauccgaacuugug

SEQ ID NO: 2783 - RNA, 22 nt, Pan paniscus
uacaguacugugauaacugaag

SEQ ID NO: 2784 - RNA, 23 nt, Pan paniscus
agcagcauuguacagggcuauga

SEQ ID NO: 2785 - RNA, 20 nt, Pan paniscus
ucaaaugcucagacuccugu

SEQ ID NO: 2786 - RNA, 24 nt, Pan paniscus
aaaagugcuuacagugcagguagc

SEQ ID NO: 2787 - RNA, 21 nt, Pan paniscus
uaaagugcugacagugcagau

SEQ ID NO: 2788 - RNA, 23 nt, Pan paniscus
agcagcauuguacagggcuauca

SEQ ID NO: 2789 - RNA, 23 nt, Pan paniscus
uacccuguagauccgaauuugug

SEQ ID NO: 2790 - RNA, 22 nt, Pan paniscus
uacccuguagaaccgaauuugu

SEQ ID NO: 2791 - RNA, 22 nt, Pan paniscus
uuaaggcacgcggugaaugcca

SEQ ID NO: 2792 - RNA, 22 nt, Pan paniscus
ucccugagacccuaacuuguga

SEQ ID NO: 2793 - RNA, 22 nt, Pan paniscus
ucacagugaaccggucucuuuu

SEQ ID NO: 2794 - RNA, 20 nt, Pan paniscus
cagugcaauguuaaaagggc

SEQ ID NO: 2795 - RNA, 22 nt, Pan paniscus
uugguccccuucaaccagcugu

SEQ ID NO: 2796 - RNA, 21 nt, Pan paniscus
ugugacugguugaccagaggg

SEQ ID NO: 2797 - RNA, 23 nt, Pan paniscus
uauggcuuuuuauuccuauguga

SEQ ID NO: 2798 - RNA, 23 nt, Pan paniscus
acuccauuuguuuugaugaugga

SEQ ID NO: 2799 - RNA, 18 nt, Pan paniscus
ucuacagugcacgugucu

SEQ ID NO: 2800 - RNA, 21 nt, Pan paniscus
aacacugucugguaaagaugc

SEQ ID NO: 2801 - RNA, 22 nt, Pan paniscus
ugagaugaagcacuguagcuca

SEQ ID NO: 2802 - RNA, 22 nt, Pan paniscus
uacaguauagaugauguacuac

SEQ ID NO: 2803 - RNA, 20 nt, Pan paniscus
guguguggaaaugcuucugc

SEQ ID NO: 2804 - RNA, 22 nt, Pan paniscus
uagguuauccguguugccuucg

SEQ ID NO: 2805 - RNA, 22 nt, Pan paniscus
uagcagcacauaaugguuugug

SEQ ID NO: 2806 - RNA, 22 nt, Pan paniscus
uagcagcacaucaugguuuaca

SEQ ID NO: 2807 - RNA, 22 nt, Pan paniscus
uagcagcacguaaauauuggcg

SEQ ID NO: 2808 - RNA, 20 nt, Pan paniscus
acugcagugaaggcacuugu

SEQ ID NO: 2809 - RNA, 24 nt, Pan paniscus
caaagugcuuacagugcagguagu

SEQ ID NO: 2810 - RNA, 22 nt, Pan paniscus
uaaggugcaucuagugcagaua

SEQ ID NO: 2811 - RNA, 23 nt, Pan paniscus
aacauucaacgcugucggugagu

SEQ ID NO: 2812 - RNA, 22 nt, Pan paniscus
accaucgaccguugauuguacc

SEQ ID NO: 2813 - RNA, 24 nt, Pan paniscus
aacauucauugcugucgguggguu

SEQ ID NO: 2814 - RNA, 22 nt, Pan paniscus
aacauucaaccugucggugagu

SEQ ID NO: 2815 - RNA, 23 nt, Pan paniscus
uauggcacugguagaauucacug

SEQ ID NO: 2816 - RNA, 23 nt, Pan paniscus
caaagaauucuccuuuugggcuu

SEQ ID NO: 2817 - RNA, 21 nt, Pan paniscus
ucgugucuuguguugcagccg

SEQ ID NO: 2818 - RNA, 22 nt, Pan paniscus
caucccuugcaugguggagggu

SEQ ID NO: 2819 - RNA, 23 nt, Pan paniscus
gugccuacugagcugauaucagu

SEQ ID NO: 2820 - RNA, 22 nt, Pan paniscus
ugauauguuugauauauuaggu

SEQ ID NO: 2821 - RNA, 21 nt, Pan paniscus
uagcagcacagaaauauuggc

SEQ ID NO: 2822 - RNA, 22 nt, Pan paniscus
uagguaguuucauguuguuggg

SEQ ID NO: 2823 - RNA, 22 nt, Pan paniscus
uucaccaccuucuccacccagc

SEQ ID NO: 2824 - RNA, 19 nt, Pan paniscus
gguccagaggggagauagg

SEQ ID NO: 2825 - RNA, 23 nt, Pan paniscus
cccaguguucagacuaccuguuc

SEQ ID NO: 2826 - RNA, 23 nt, Pan paniscus
ugugcaaaucuaugcaaaacuga

SEQ ID NO: 2827 - RNA, 23 nt, Pan paniscus
ugugcaaauccaugcaaaacuga

SEQ ID NO: 2828 - RNA, 22 nt, Pan paniscus
uaaagugcuuauagugcaggua

SEQ ID NO: 2829 - RNA, 22 nt, Pan paniscus
uucccuuugucauccuaugccu

SEQ ID NO: 2830 - RNA, 22 nt, Pan paniscus
uccuucauuccaccggagucug

SEQ ID NO: 2831 - RNA, 22 nt, Pan paniscus
uagcuuaucagacugauguuga

SEQ ID NO: 2832 - RNA, 21 nt, Pan paniscus
acagcaggcacagacaggcag

SEQ ID NO: 2833 - RNA, 21 nt, Pan paniscus
uaaucucagcuggcaacugug

SEQ ID NO: 2834 - RNA, 24 nt, Pan paniscus
uacugcaucaggaacugauuggau

SEQ ID NO: 2835 - RNA, 21 nt, Pan paniscus
uugugcuugaucuaaccaugu

SEQ ID NO: 2836 - RNA, 22 nt, Pan paniscus
aagcugccaguugaagaacugu

SEQ ID NO: 2837 - RNA, 21 nt, Pan paniscus
ccacaccguaucugacacuuu

SEQ ID NO: 2838 - RNA, 23 nt, Pan paniscus
agcuacauugucugcuggguuuc

SEQ ID NO: 2839 - RNA, 21 nt, Pan paniscus
ugucaguuugucaaauacccc

SEQ ID NO: 2840 - RNA, 23 nt, Pan paniscus
caagucacuagugguuccguuua

SEQ ID NO: 2841 - RNA, 21 nt, Pan paniscus
aucacauugccagggauuucc

SEQ ID NO: 2842 - RNA, 23 nt, Pan paniscus
aucacauugccagggauuaccac

SEQ ID NO: 2843 - RNA, 22 nt, Pan paniscus
uggcucaguucagcaggaacag

SEQ ID NO: 2844 - RNA, 22 nt, Pan paniscus
cauugcacuugucucggucuga

SEQ ID NO: 2845 - RNA, 22 nt, Pan paniscus
uucaaguaauccaggauaggcu

SEQ ID NO: 2846 - RNA, 22 nt, Pan paniscus
uucacaguggcuaaguuccgcc

SEQ ID NO: 2847 - RNA, 22 nt, Pan paniscus
aaggagcucacagucuauugag

SEQ ID NO: 2848 - RNA, 22 nt, Pan paniscus
cuagcaccaucugaaaucgguu

SEQ ID NO: 2849 - RNA, 20 nt, Pan paniscus
uagcaccauuugaaaucagu

SEQ ID NO: 2850 - RNA, 22 nt, Pan paniscus
cuuucagucggauguuugcagc

SEQ ID NO: 2851 - RNA, 22 nt, Pan paniscus
uguaaacauccucgacuggaag

SEQ ID NO: 2852 - RNA, 21 nt, Pan paniscus
uguaaacauccuacacucagc

SEQ ID NO: 2853 - RNA, 22 nt, Pan paniscus
uguaaacauccccgacuggaag

SEQ ID NO: 2854 - RNA, 21 nt, Pan paniscus
ggcaagaugcuggcauagcug

SEQ ID NO: 2855 - RNA, 21 nt, Pan paniscus
uauugcacauuacuaaguugc

SEQ ID NO: 2856 - RNA, 19 nt, Pan paniscus
gugcauuguaguugcauug

SEQ ID NO: 2857 - RNA, 22 nt, Pan paniscus
uggcagugucuuagcugguugu

SEQ ID NO: 2858 - RNA, 21 nt, Pan paniscus
uggaagacuagugauuuuguu

SEQ ID NO: 2859 - RNA, 22 nt, Pan paniscus
uauugcacuugucccggccugu

SEQ ID NO: 2860 - RNA, 22 nt, Pan paniscus
aaagugcuguucgugcagguag

SEQ ID NO: 2861 - RNA, 22 nt, Pan paniscus
uucaacggguauuuauugagca

SEQ ID NO: 2862 - RNA, 22 nt, Pan paniscus
uuuggcacuagcacauuuuugc

SEQ ID NO: 2863 - RNA, 22 nt, Pan paniscus
ugagguaguaaguuguauuguu

SEQ ID NO: 2864 - RNA, 22 nt, Pan paniscus
aacccguagauccgaucuugug

SEQ ID NO: 2865 - RNA, 21 nt, Physcomitrella patens
agaagccuuugugggagagga

SEQ ID NO: 2866 - RNA, 21 nt, Physcomitrella patens
agggagggaugguuaugcaag

SEQ ID NO: 2867 - RNA, 21 nt, Physcomitrella patens
cgugggacagcauagaaugcg

SEQ ID NO: 2868 - RNA, 21 nt, Physcomitrella patens
guuggaagccuucgugggaga

SEQ ID NO: 2869 - RNA, 21 nt, Physcomitrella patens
uacuaugagaaucucgcggcc

SEQ ID NO: 2870 - RNA, 21 nt, Physcomitrella patens
ucauugcaaaacuguauacga

SEQ ID NO: 2871 - RNA, 21 nt, Physcomitrella patens
ugauggugaugcgcuuguauc

SEQ ID NO: 2872 - RNA, 21 nt, Physcomitrella patens
aauuugaagcaugaugucaag

SEQ ID NO: 2873 - RNA, 21 nt, Physcomitrella patens
ccuuagagucguaggccucug

SEQ ID NO: 2874 - RNA, 21 nt, Physcomitrella patens
cuuccugccucucacuagcuu

SEQ ID NO: 2875 - RNA, 21 nt, Physcomitrella patens
cuuccugccucucacuagcuu

SEQ ID NO: 2876 - RNA, 21 nt, Physcomitrella patens
cuuccugccucucacuagcuu

SEQ ID NO: 2877 - RNA, 20 nt, Physcomitrella patens
uuccugccucucacuagcuu

SEQ ID NO: 2878 - RNA, 21 nt, Physcomitrella patens
gaagauagaggaguucaagaa

SEQ ID NO: 2879 - RNA, 21 nt, Physcomitrella patens
gaagauagaggaguucaagaa

SEQ ID NO: 2880 - RNA, 21 nt, Physcomitrella patens
uggauggugugcagggucaaa

SEQ ID NO: 2881 - RNA, 21 nt, Physcomitrella patens
uugaaggaguucauugguaua

SEQ ID NO: 2882 - RNA, 21 nt, Physcomitrella patens
uuguagagucauacaccucca

SEQ ID NO: 2883 - RNA, 20 nt, Physcomitrella patens
ugacagaagagagugagcac

SEQ ID NO: 2884 - RNA, 20 nt, Physcomitrella patens
cuuggacugaagggagcucc

SEQ ID NO: 2885 - RNA, 20 nt, Physcomitrella patens
cuuggacugaagggagcucc

SEQ ID NO: 2886 - RNA, 21 nt, Physcomitrella patens
cuuggacugaagggagcuccc

SEQ ID NO: 2887 - RNA, 21 nt, Physcomitrella patens
cuuggacugaagggagcuccc

SEQ ID NO: 2888 - RNA, 21 nt, Physcomitrella patens
aagcucaggagggauagcgcc

SEQ ID NO: 2889 - RNA, 21 nt, Physcomitrella patens
aagcucaggagggauagcgcc

SEQ ID NO: 2890 - RNA, 20 nt, Physcomitrella patens
agcucaggagggauagcgcc

SEQ ID NO: 2891 - RNA, 21 nt, Physcomitrella patens
gagcuggccaggcugugaggg

SEQ ID NO: 2892 - RNA, 21 nt, Physcomitrella patens
gagcuguccaggcugugaggg

SEQ ID NO: 2893 - RNA, 22 nt, Physcomitrella patens
uauguccauugcaguugcauac

SEQ ID NO: 2894 - RNA, 21 nt, Physcomitrella patens
ugacaacgagagagagcacgc

SEQ ID NO: 2895 - RNA, 21 nt, Physcomitrella patens
ugacaacgagagagagcacgc

SEQ ID NO: 2896 - RNA, 21 nt, Physcomitrella patens
ugacaacgagagagagcacgc

SEQ ID NO: 2897 - RNA, 22 nt, Physcomitrella patens
ugacaacgagagagagcacgcc

SEQ ID NO: 2898 - RNA, 22 nt, Physcomitrella patens
uucgugccaagcugugugcaac

SEQ ID NO: 2899 - RNA, 21 nt, Physcomitrella patens
uugagguguuucuacaggcua

SEQ ID NO: 2900 - RNA, 21 nt, Physcomitrella patens
uugagguguuucuacaggcua

SEQ ID NO: 2901 - RNA, 22 nt, Physcomitrella patens
uugcauggagucuaugucugga

SEQ ID NO: 2902 - RNA, 22 nt, Physcomitrella patens
uugcauggagucuaugucugga

SEQ ID NO: 2903 - RNA, 22 nt, Physcomitrella patens
uugcauggagucuaugucugga

SEQ ID NO: 2904 - RNA, 22 nt, Pongo pygmaeus
aacccguagauccgaacuugug

SEQ ID NO: 2905 - RNA, 22 nt, Pongo pygmaeus
uacaguacugugauaacugaag

SEQ ID NO: 2906 - RNA, 23 nt, Pongo pygmaeus
agcagcauuguacagggcuauga

SEQ ID NO: 2907 - RNA, 20 nt, Pongo pygmaeus
ucaaaugcucagacuccugu

SEQ ID NO: 2908 - RNA, 24 nt, Pongo pygmaeus
aaaagugcuuacagugcagguagc

SEQ ID NO: 2909 - RNA, 21 nt, Pongo pygmaeus
uaaagugcugacagugcagau

SEQ ID NO: 2910 - RNA, 23 nt, Pongo pygmaeus
agcagcauuguacagggcuauca

SEQ ID NO: 2911 - RNA, 23 nt, Pongo pygmaeus
uaccccguagauccgaauuugug

SEQ ID NO: 2912 - RNA, 22 nt, Pongo pygmaeus
uuaaggcacgcggugaaugcca

SEQ ID NO: 2913 - RNA, 22 nt, Pongo pygmaeus
ucccugagacccuaacuuguga

SEQ ID NO: 2914 - RNA, 22 nt, Pongo pygmaeus
ucggauccgucugagcuuggcu

SEQ ID NO: 2915 - RNA, 22 nt, Pongo pygmaeus
ucacagugaaccggucucuuuu

SEQ ID NO: 2916 - RNA, 21 nt, Pongo pygmaeus
uuguccccuucaaccagcugu

SEQ ID NO: 2917 - RNA, 21 nt, Pongo pygmaeus
ugugacugguugaccagaggg

SEQ ID NO: 2918 - RNA, 23 nt, Pongo pygmaeus
uauggcuuuuuauuccuauguga

SEQ ID NO: 2919 - RNA, 23 nt, Pongo pygmaeus
acuccauuuguuuugaugaugga

SEQ ID NO: 2920 - RNA, 21 nt, Pongo pygmaeus
aacacugucugguaaagaugg

SEQ ID NO: 2921 - RNA, 22 nt, Pongo pygmaeus
ugagaugaagcacuguagcuca

SEQ ID NO: 2922 - RNA, 22 nt, Pongo pygmaeus
uacaguauagaugauguacuag

SEQ ID NO: 2923 - RNA, 24 nt, Pongo pygmaeus
guccaguuuucccaggaaucccuu

SEQ ID NO: 2924 - RNA, 20 nt, Pongo pygmaeus
guguguggaaaugcuucugc

SEQ ID NO: 2925 - RNA, 20 nt, Pongo pygmaeus
uugcauagucacaaaaguga

SEQ ID NO: 2926 - RNA, 22 nt, Pongo pygmaeus
uagguuauccguguugccuucg

SEQ ID NO: 2927 - RNA, 22 nt, Pongo pygmaeus
uagcagcacauaaugguuugug

SEQ ID NO: 2928 - RNA, 22 nt, Pongo pygmaeus
uagcagcacaucaugguuuaca

SEQ ID NO: 2929 - RNA, 22 nt, Pongo pygmaeus
uagcagcacguaaauauuggcg

SEQ ID NO: 2930 - RNA, 20 nt, Pongo pygmaeus
acugcagugaaggcacuugu

SEQ ID NO: 2931 - RNA, 24 nt, Pongo pygmaeus
caaagugcuuacagugcagguagu

SEQ ID NO: 2932 - RNA, 22 nt, Pongo pygmaeus
uaaggugcaucuagugcagaua

SEQ ID NO: 2933 - RNA, 23 nt, Pongo pygmaeus
aacauucaacgcugucggugagu

SEQ ID NO: 2934 - RNA, 22 nt, Pongo pygmaeus
accaucgaccguugauuguacc

SEQ ID NO: 2935 - RNA, 24 nt, Pongo pygmaeus
aacauucauugcugucgguggguu

SEQ ID NO: 2936 - RNA, 22 nt, Pongo pygmaeus
uuuggcaaugguagaacucaca

SEQ ID NO: 2937 - RNA, 22 nt, Pongo pygmaeus
uggacggagaacugauaagggu

SEQ ID NO: 2938 - RNA, 21 nt, Pongo pygmaeus
ucgugucuuguguugcagccg

SEQ ID NO: 2939 - RNA, 22 nt, Pongo pygmaeus
caucccuugcaugguggagggu

SEQ ID NO: 2940 - RNA, 23 nt, Pongo pygmaeus
gugccuacugagcugauaucagu

SEQ ID NO: 2941 - RNA, 22 nt, Pongo pygmaeus
uguaacagcaacuccaugugga

SEQ ID NO: 2942 - RNA, 21 nt, Pongo pygmaeus
uagguaguuucauguuguugg

SEQ ID NO: 2943 - RNA, 22 nt, Pongo pygmaeus
uagguaguuucauguuguuggg

SEQ ID NO: 2944 - RNA, 22 nt, Pongo pygmaeus
uucaccaccuucuccacccagc

SEQ ID NO: 2945 - RNA, 19 nt, Pongo pygmaeus
gguccagaggggagauagg

SEQ ID NO: 2946 - RNA, 23 nt, Pongo pygmaeus
cccaguguucagacuaccuguuc

SEQ ID NO: 2947 - RNA, 23 nt, Pongo pygmaeus
ugugcaaaucuaugcaaaacuga

SEQ ID NO: 2948 - RNA, 23 nt, Pongo pygmaeus
ugugcaaauccaugcaaaacuga

SEQ ID NO: 2949 - RNA, 22 nt, Pongo pygmaeus
uaaagugcuuauagugcaggua

SEQ ID NO: 2950 - RNA, 22 nt, Pongo pygmaeus
aauacugccggguaaugaugga

SEQ ID NO: 2951 - RNA, 22 nt, Pongo pygmaeus
uucccuuugucauccuaugccu

SEQ ID NO: 2952 - RNA, 22 nt, Pongo pygmaeus
uggaauguaaggaagugugugg

SEQ ID NO: 2953 - RNA, 22 nt, Pongo pygmaeus
uagcuuaucagacugauguuga

SEQ ID NO: 2954 - RNA, 22 nt, Pongo pygmaeus
uucccuuugucauccuucgccu

SEQ ID NO: 2955 - RNA, 21 nt, Pongo pygmaeus
acagcaggcacagacaggcag

SEQ ID NO: 2956 - RNA, 21 nt, Pongo pygmaeus
augaccuaugaauugacagac

SEQ ID NO: 2957 - RNA, 21 nt, Pongo pygmaeus
uaaucucagcuggcaacugug

SEQ ID NO: 2958 - RNA, 21 nt, Pongo pygmaeus
uugugcuugaucuaaccaugu

SEQ ID NO: 2959 - RNA, 21 nt, Pongo pygmaeus
ugauuguccaaacgcaauucu

SEQ ID NO: 2960 - RNA, 22 nt, Pongo pygmaeus
aagcugccaguugaagaacugu

SEQ ID NO: 2961 - RNA, 23 nt, Pongo pygmaeus
agcuacauugucugcuggguuuc

SEQ ID NO: 2962 - RNA, 21 nt, Pongo pygmaeus
ugucaguuugucaaauacccc

SEQ ID NO: 2963 - RNA, 23 nt, Pongo pygmaeus
caagucacuagugguuccguuua

SEQ ID NO: 2964 - RNA, 21 nt, Pongo pygmaeus
aucacauugccagggauuucc

SEQ ID NO: 2965 - RNA, 23 nt, Pongo pygmaeus
aucacauugccagggauuaccac

SEQ ID NO: 2966 - RNA, 22 nt, Pongo pygmaeus
uggcucaguucagcaggaacag

SEQ ID NO: 2967 - RNA, 22 nt, Pongo pygmaeus
cauugcacuugucucggucuga

SEQ ID NO: 2968 - RNA, 22 nt, Pongo pygmaeus
uucaaguaauccaggauaggcu

SEQ ID NO: 2969 - RNA, 22 nt, Pongo pygmaeus
uucacaguggcuaaguuccgcc

SEQ ID NO: 2970 - RNA, 22 nt, Pongo pygmaeus
aaggagcucacagucuauugag

SEQ ID NO: 2971 - RNA, 22 nt, Pongo pygmaeus
cuagcaccaucugaaaucgguu

SEQ ID NO: 2972 - RNA, 20 nt, Pongo pygmaeus
uagcaccauuugaaaucagu

SEQ ID NO: 2973 - RNA, 22 nt, Pongo pygmaeus
cuuucagucggauguuugcagc

SEQ ID NO: 2974 - RNA, 22 nt, Pongo pygmaeus
uguaaacauccucgacuggaag

SEQ ID NO: 2975 - RNA, 21 nt, Pongo pygmaeus
ggcaagaugcuggcauagcug

SEQ ID NO: 2976 - RNA, 21 nt, Pongo pygmaeus
uauugcacauuacuaaguugc

SEQ ID NO: 2977 - RNA, 19 nt, Pongo pygmaeus
gugcauuguaguugcauug

SEQ ID NO: 2978 - RNA, 22 nt, Pongo pygmaeus
uggcagugucuuagcugguugu

SEQ ID NO: 2979 - RNA, 21 nt, Pongo pygmaeus
uggaagacuagugauuuuguu

SEQ ID NO: 2980 - RNA, 22 nt, Pongo pygmaeus
uauugcacuugucccggccugu

SEQ ID NO: 2981 - RNA, 22 nt, Pongo pygmaeus
aaagugcuguucgugcagguag

SEQ ID NO: 2982 - RNA, 22 nt, Pongo pygmaeus
uucaacggguauuuauugagca

SEQ ID NO: 2983 - RNA, 22 nt, Pongo pygmaeus
ugagguaguaaguuguauuguu

SEQ ID NO: 2984 - RNA, 22 nt, Pongo pygmaeus
aacccguagauccgaucuugug

SEQ ID NO: 2985 - RNA, 20 nt, Populus trichocarpa
ugacagaagagagugagcac

SEQ ID NO: 2986 - RNA, 20 nt, Populus trichocarpa
ugacagaagagagugagcac

SEQ ID NO: 2987 - RNA, 20 nt, Populus trichocarpa
ugacagaagagagugagcac

SEQ ID NO: 2988 - RNA, 20 nt, Populus trichocarpa
ugacagaagagagugagcac

SEQ ID NO: 2989 - RNA, 20 nt, Populus trichocarpa
ugacagaagagagugagcac

SEQ ID NO: 2990 - RNA, 20 nt, Populus trichocarpa
ugacagaagagagugagcac

SEQ ID NO: 2991 - RNA, 21 nt, Populus trichocarpa
uugacagaagauagagagcac

SEQ ID NO: 2992 - RNA, 21 nt, Populus trichocarpa
uugacagaagauagagagcac

SEQ ID NO: 2993 - RNA, 21 nt, Populus trichocarpa
uugacagaagauagagagcac

SEQ ID NO: 2994 - RNA, 21 nt, Populus trichocarpa
uugacagaagauagagagcac

SEQ ID NO: 2995 - RNA, 20 nt, Populus trichocarpa
ugacagaagagagggagcac

SEQ ID NO: 2996 - RNA, 21 nt, Populus trichocarpa
uuuggauugaagggagcucua

SEQ ID NO: 2997 - RNA, 21 nt, Populus trichocarpa
uuuggauugaagggagcucua

SEQ ID NO: 2998 - RNA, 21 nt, Populus trichocarpa
uuuggauugaagggagcucua

SEQ ID NO: 2999 - RNA, 21 nt, Populus trichocarpa
cuuggauugaagggagcuccu

SEQ ID NO: 3000 - RNA, 21 nt, Populus trichocarpa
cuuggggugaagggagcuccu

SEQ ID NO: 3001 - RNA, 21 nt, Populus trichocarpa
auuggagugaagggagcucga

SEQ ID NO: 3002 - RNA, 21 nt, Populus trichocarpa
ugccuggcucccuguaugcca

SEQ ID NO: 3003 - RNA, 21 nt, Populus trichocarpa
ugccuggcucccuguaugcca

SEQ ID NO: 3004 - RNA, 21 nt, Populus trichocarpa
ugccuggcucccuguaugcca

SEQ ID NO: 3005 - RNA, 21 nt, Populus trichocarpa
ugccuggcucccuguaugcca

SEQ ID NO: 3006 - RNA, 21 nt, Populus trichocarpa
ugccuggcucccugaaugcca

SEQ ID NO: 3007 - RNA, 21 nt, Populus trichocarpa
ugccuggcucccugaaugcca

SEQ ID NO: 3008 - RNA, 21 nt, Populus trichocarpa
ugccuggcucccuggaugcca

SEQ ID NO: 3009 - RNA, 21 nt, Populus trichocarpa
ugccuggcucccugcaugcca

SEQ ID NO: 3010 - RNA, 21 nt, Populus trichocarpa
ucgauaaaccucugcauccag

SEQ ID NO: 3011 - RNA, 21 nt, Populus trichocarpa
ucgauaaaccucugcauccag

SEQ ID NO: 3012 - RNA, 21 nt, Populus trichocarpa
ucgauaaaccucugcauccag

SEQ ID NO: 3013 - RNA, 21 nt, Populus trichocarpa
uggagaagcagggcacgugca

SEQ ID NO: 3014 - RNA, 21 nt, Populus trichocarpa
uggagaagcagggcacgugca

SEQ ID NO: 3015 - RNA, 21 nt, Populus trichocarpa
uggagaagcagggcacgugca

SEQ ID NO: 3016 - RNA, 21 nt, Populus trichocarpa
uggagaagcagggcacgugca

SEQ ID NO: 3017 - RNA, 21 nt, Populus trichocarpa
uggagaagcagggcacgugca

SEQ ID NO: 3018 - RNA, 21 nt, Populus trichocarpa
uggagaagcagggcacaugcu

SEQ ID NO: 3019 - RNA, 21 nt, Populus trichocarpa
ucggaccaggcuucauucccc

SEQ ID NO: 3020 - RNA, 21 nt, Populus trichocarpa
ucggaccaggcuucauucccc

SEQ ID NO: 3021 - RNA, 21 nt, Populus trichocarpa
ucggaccaggcuucauucccc

SEQ ID NO: 3022 - RNA, 21 nt, Populus trichocarpa
ucggaccaggcuucauucccc

SEQ ID NO: 3023 - RNA, 21 nt, Populus trichocarpa
ucggaccaggcuucauucccc

SEQ ID NO: 3024 - RNA, 21 nt, Populus trichocarpa
ucggaccaggcuucauucccc

SEQ ID NO: 3025 - RNA, 21 nt, Populus trichocarpa
ucggaccaggcuucauucccc

SEQ ID NO: 3026 - RNA, 21 nt, Populus trichocarpa
ucggaccaggcuucauucccc

SEQ ID NO: 3027 - RNA, 21 nt, Populus trichocarpa
ucggaccaggcuucauucccc

SEQ ID NO: 3028 - RNA, 21 nt, Populus trichocarpa
ucggaccaggcuucauucccc

SEQ ID NO: 3029 - RNA, 21 nt, Populus trichocarpa
ucggaccaggcuucauucccc

SEQ ID NO: 3030 - RNA, 21 nt, Populus trichocarpa
ucggaccaggcuucauucccc

SEQ ID NO: 3031 - RNA, 21 nt, Populus trichocarpa
ucggaccaggcuucauucccc

SEQ ID NO: 3032 - RNA, 21 nt, Populus trichocarpa
ucggaccaggcuucauuccuu

SEQ ID NO: 3033 - RNA, 21 nt, Populus trichocarpa
ucggaccaggcuucauuccuu

SEQ ID NO: 3034 - RNA, 21 nt, Populus trichocarpa
ucggaccaggcuccauuccuu

SEQ ID NO: 3035 - RNA, 21 nt, Populus trichocarpa
ucggaccaggcuucauuccuu

SEQ ID NO: 3036 - RNA, 21 nt, Populus trichocarpa
ugaagcugccagcaugaucua

SEQ ID NO: 3037 - RNA, 21 nt, Populus trichocarpa
ugaagcugccagcaugaucua

SEQ ID NO: 3038 - RNA, 21 nt, Populus trichocarpa
ugaagcugccagcaugaucua

SEQ ID NO: 3039 - RNA, 21 nt, Populus trichocarpa
ugaagcugccagcaugaucua

SEQ ID NO: 3040 - RNA, 21 nt, Populus trichocarpa
ugaagcugccagcaugaucug

SEQ ID NO: 3041 - RNA, 21 nt, Populus trichocarpa
ugaagcugccagcaugaucuu

SEQ ID NO: 3042 - RNA, 21 nt, Populus trichocarpa
ugaagcugccagcaugaucuu

SEQ ID NO: 3043 - RNA, 21 nt, Populus trichocarpa
ugaagcugccaacaugaucug

SEQ ID NO: 3044 - RNA, 21 nt, Populus trichocarpa
ucgcuuggugcaggucgggaa

SEQ ID NO: 3045 - RNA, 21 nt, Populus trichocarpa
ucgcuuggugcaggucgggaa

SEQ ID NO: 3046 - RNA, 21 nt, Populus trichocarpa
cagccaaggaugacuugccga

SEQ ID NO: 3047 - RNA, 21 nt, Populus trichocarpa
gagccaagaaugacuugucgg

SEQ ID NO: 3048 - RNA, 21 nt, Populus trichocarpa
uagccaaggacgacuugccca

SEQ ID NO: 3049 - RNA, 21 nt, Populus trichocarpa
uagccaaggacgacuugccca

SEQ ID NO: 3050 - RNA, 21 nt, Populus trichocarpa
uagccaaggacgacuugccca

SEQ ID NO: 3051 - RNA, 21 nt, Populus trichocarpa
uagccaaggacgacuugccca

SEQ ID NO: 3052 - RNA, 21 nt, Populus trichocarpa
uagccaaggacgacuugccca

SEQ ID NO: 3053 - RNA, 21 nt, Populus trichocarpa
cagccaaggaugacuugccga

SEQ ID NO: 3054 - RNA, 21 nt, Populus trichocarpa
cagccaaggaugacuugccga

SEQ ID NO: 3055 - RNA, 21 nt, Populus trichocarpa
cagccaaggaugacuugccgg

SEQ ID NO: 3056 - RNA, 21 nt, Populus trichocarpa
cagccaaggaugacuugccgg

SEQ ID NO: 3057 - RNA, 21 nt, Populus trichocarpa
cagccaaggaugacuugccgg

SEQ ID NO: 3058 - RNA, 21 nt, Populus trichocarpa
cagccaaggaugacuugccgg

SEQ ID NO: 3059 - RNA, 21 nt, Populus trichocarpa
cagccaaggaugacuugccgg

SEQ ID NO: 3060 - RNA, 21 nt, Populus trichocarpa
uagccaaggaugacuugccug

SEQ ID NO: 3061 - RNA, 21 nt, Populus trichocarpa
uagccaaggaugacuugccug

SEQ ID NO: 3062 - RNA, 21 nt, Populus trichocarpa
uagccaaggaugacuugccug

SEQ ID NO: 3063 - RNA, 21 nt, Populus trichocarpa
uagccaaggaugacuugccug

SEQ ID NO: 3064 - RNA, 21 nt, Populus trichocarpa
uagccaaggaugacuugccug

SEQ ID NO: 3065 - RNA, 21 nt, Populus trichocarpa
ugagccaaggaugacuugccg

SEQ ID NO: 3066 - RNA, 21 nt, Populus trichocarpa
aagccaaggaugacuugccug

SEQ ID NO: 3067 - RNA, 21 nt, Populus trichocarpa
aagccaaggaugacuugccug

SEQ ID NO: 3068 - RNA, 21 nt, Populus trichocarpa
uagccaaggacgacuugccug

SEQ ID NO: 3069 - RNA, 21 nt, Populus trichocarpa
uagccaaggaugacuugccua

SEQ ID NO: 3070 - RNA, 21 nt, Populus trichocarpa
ucagccaaggaugacuugccg

SEQ ID NO: 3071 - RNA, 21 nt, Populus trichocarpa
gagccaagaaugacuugccgg

SEQ ID NO: 3072 - RNA, 21 nt, Populus trichocarpa
uagccaaggacgacuugccua

SEQ ID NO: 3073 - RNA, 21 nt, Populus trichocarpa
uagccaaggaugacuugccca

SEQ ID NO: 3074 - RNA, 21 nt, Populus trichocarpa
uagccaaggaugacuugccca

SEQ ID NO: 3075 - RNA, 21 nt, Populus trichocarpa
uagccaaggaugacuugcucg

SEQ ID NO: 3076 - RNA, 21 nt, Populus trichocarpa
uagccauggaugaauugccug

SEQ ID NO: 3077 - RNA, 21 nt, Populus trichocarpa
cagccaagaaugauuugccgg

SEQ ID NO: 3078 - RNA, 21 nt, Populus trichocarpa
uugagccgugccaauaucacg

SEQ ID NO: 3079 - RNA, 21 nt, Populus trichocarpa
uugagccgugccaauaucacg

SEQ ID NO: 3080 - RNA, 21 nt, Populus trichocarpa
agauugagccgcgccaauauc

SEQ ID NO: 3081 - RNA, 21 nt, Populus trichocarpa
agauugagccgcgccaauauc

SEQ ID NO: 3082 - RNA, 21 nt, Populus trichocarpa
ugauugagccgugccaauauc

SEQ ID NO: 3083 - RNA, 21 nt, Populus trichocarpa
ugauugagccgugccaauauc

SEQ ID NO: 3084 - RNA, 21 nt, Populus trichocarpa
ugauugagccgugccaauauc

SEQ ID NO: 3085 - RNA, 21 nt, Populus trichocarpa
ugauugagccgugccaauauc

SEQ ID NO: 3086 - RNA, 21 nt, Populus trichocarpa
ugauugagccgugccaauauc

SEQ ID NO: 3087 - RNA, 21 nt, Populus trichocarpa
ggauugagccgcgccaauacu

SEQ ID NO: 3088 - RNA, 21 nt, Populus trichocarpa
ggauugagccgcgccaauauc

SEQ ID NO: 3089 - RNA, 21 nt, Populus trichocarpa
agaaucuugaugaugcugcau

SEQ ID NO: 3090 - RNA, 21 nt, Populus trichocarpa
agaaucuugaugaugcugcau

SEQ ID NO: 3091 - RNA, 21 nt, Populus trichocarpa
agaaucuugaugaugcugcau

SEQ ID NO: 3092 - RNA, 21 nt, Populus trichocarpa
ggaaucuugaugaugcugcau

SEQ ID NO: 3093 - RNA, 21 nt, Populus trichocarpa
ggaaucuugaugaugcugcau

SEQ ID NO: 3094 - RNA, 21 nt, Populus trichocarpa
agaaucuugaugaugcugcau

SEQ ID NO: 3095 - RNA, 21 nt, Populus trichocarpa
ggaaucuugaugaugcugcag

SEQ ID NO: 3096 - RNA, 21 nt, Populus trichocarpa
ggaaucuugaugaugcugcag

SEQ ID NO: 3097 - RNA, 21 nt, Populus trichocarpa
agaauccugaugaugcugcaa

SEQ ID NO: 3098 - RNA, 20 nt, Populus trichocarpa
uuggacugaagggagcuccc

SEQ ID NO: 3099 - RNA, 20 nt, Populus trichocarpa
uuggacugaagggagcuccc

SEQ ID NO: 3100 - RNA, 20 nt, Populus trichocarpa
uuggacugaagggagcuccc

SEQ ID NO: 3101 - RNA, 20 nt, Populus trichocarpa
uuggacugaagggagcuccc

SEQ ID NO: 3102 - RNA, 20 nt, Populus trichocarpa
uuggacugaagggagcuccu

SEQ ID NO: 3103 - RNA, 20 nt, Populus trichocarpa
uuggacugaagggagcuccu

SEQ ID NO: 3104 - RNA, 20 nt, Populus trichocarpa
uuggacugaagggagcuccu

SEQ ID NO: 3105 - RNA, 20 nt, Populus trichocarpa
uuggacugaagggagcuccu

SEQ ID NO: 3106 - RNA, 20 nt, Populus trichocarpa
uugggcugaagggagcuccc

SEQ ID NO: 3107 - RNA, 21 nt, Populus trichocarpa
aagcucaggagggauagcgcc

SEQ ID NO: 3108 - RNA, 21 nt, Populus trichocarpa
aagcucaggagggauagcgcc

SEQ ID NO: 3109 - RNA, 21 nt, Populus trichocarpa
aagcucaggagggauagcgcc

SEQ ID NO: 3110 - RNA, 21 nt, Populus trichocarpa
aagcucaggagggauagcgcc

SEQ ID NO: 3111 - RNA, 21 nt, Populus trichocarpa
uccaaagggaucgcauugauc

SEQ ID NO: 3112 - RNA, 21 nt, Populus trichocarpa
uccaaagggaucgcauugauc

SEQ ID NO: 3113 - RNA, 21 nt, Populus trichocarpa
uccaaagggaucgcauugauc

SEQ ID NO: 3114 - RNA, 21 nt, Populus trichocarpa
uccaaagggaucgcauugauc

SEQ ID NO: 3115 - RNA, 20 nt, Populus trichocarpa
uuggcauucuguccaccucc

SEQ ID NO: 3116 - RNA, 20 nt, Populus trichocarpa
uuggcauucuguccaccucc

SEQ ID NO: 3117 - RNA, 21 nt, Populus trichocarpa
cugaaggguuuggaggaacuc

SEQ ID NO: 3118 - RNA, 21 nt, Populus trichocarpa
cugaaguguuugggggaacuc

SEQ ID NO: 3119 - RNA, 21 nt, Populus trichocarpa
cugaaguguuugggggaacuc

SEQ ID NO: 3120 - RNA, 21 nt, Populus trichocarpa
cugaaguguuugggggaacuc

SEQ ID NO: 3121 - RNA, 21 nt, Populus trichocarpa
cugaaguguuugggggaacuc

SEQ ID NO: 3122 - RNA, 21 nt, Populus trichocarpa
cugaaguguuugggggaacuc

SEQ ID NO: 3123 - RNA, 21 nt, Populus trichocarpa
cugaaguguuugggggaacuc

SEQ ID NO: 3124 - RNA, 21 nt, Populus trichocarpa
cugaaguguuugggggaacuc

SEQ ID NO: 3125 - RNA, 21 nt, Populus trichocarpa
cugaaguguuugggggaacuc

SEQ ID NO: 3126 - RNA, 21 nt, Populus trichocarpa
cugaaguguuugggggaacuc

SEQ ID NO: 3127 - RNA, 21 nt, Populus trichocarpa
uuccacagcuuucuugaacug

SEQ ID NO: 3128 - RNA, 21 nt, Populus trichocarpa
uuccacagcuuucuugaacug

SEQ ID NO: 3129 - RNA, 21 nt, Populus trichocarpa
uuccacagcuuucuugaacuu

SEQ ID NO: 3130 - RNA, 21 nt, Populus trichocarpa
uuccacagcuuucuugaacuu

SEQ ID NO: 3131 - RNA, 21 nt, Populus trichocarpa
uuccacagcuuucuugaacuu

SEQ ID NO: 3132 - RNA, 21 nt, Populus trichocarpa
uuccacggcuuucuugaacug

SEQ ID NO: 3133 - RNA, 21 nt, Populus trichocarpa
uuccacggcuuucuugaacuu

SEQ ID NO: 3134 - RNA, 21 nt, Populus trichocarpa
ucauugagugcagcguugaug

SEQ ID NO: 3135 - RNA, 21 nt, Populus trichocarpa
ccauugagugcagcguugaug

SEQ ID NO: 3136 - RNA, 21 nt, Populus trichocarpa
ucauugaguggagcuuugaug

SEQ ID NO: 3137 - RNA, 21 nt, Populus trichocarpa
uguguucucaggucaccccuu

SEQ ID NO: 3138 - RNA, 21 nt, Populus trichocarpa
uguguucucaggucgccccug

SEQ ID NO: 3139 - RNA, 21 nt, Populus trichocarpa
uguguucucaggucgccccug

SEQ ID NO: 3140 - RNA, 21 nt, Populus trichocarpa
ugccaaaggagauuugccccg

SEQ ID NO: 3141 - RNA, 21 nt, Populus trichocarpa
ugccaaaggagauuugcccgg

SEQ ID NO: 3142 - RNA, 21 nt, Populus trichocarpa
ugccaaaggagauuugcccgg

SEQ ID NO: 3143 - RNA, 21 nt, Populus trichocarpa
ugccaaagaagauuugccccg

SEQ ID NO: 3144 - RNA, 21 nt, Populus trichocarpa
ugccaaagaagauuugccccg

SEQ ID NO: 3145 - RNA, 21 nt, Populus trichocarpa
ugccaaaggagaauugcccug

SEQ ID NO: 3146 - RNA, 21 nt, Populus trichocarpa
ugccaaaggagaauugcccug

SEQ ID NO: 3147 - RNA, 21 nt, Populus trichocarpa
ugccaaaggagaguuucccug

SEQ ID NO: 3148 - RNA, 21 nt, Populus trichocarpa
ugccaaaggagaguugcccua

SEQ ID NO: 3149 - RNA, 21 nt, Populus trichocarpa
ugccaaaggagauuuguccgg

SEQ ID NO: 3150 - RNA, 21 nt, Populus trichocarpa
ugccaaaggagauuugcucac

SEQ ID NO: 3151 - RNA, 21 nt, Populus trichocarpa
cgccaaaggagaguugcccuc

SEQ ID NO: 3152 - RNA, 21 nt, Populus trichocarpa
uuagauucacgcacaaacucg

SEQ ID NO: 3153 - RNA, 21 nt, Populus trichocarpa
uuagauucacgcacaaacucg

SEQ ID NO: 3154 - RNA, 21 nt, Populus trichocarpa
uuagauucacgcacaaacucg

SEQ ID NO: 3155 - RNA, 21 nt, Populus trichocarpa
augcacugccucuucccuggc

SEQ ID NO: 3156 - RNA, 22 nt, Populus trichocarpa
uuuucccuacuccacccauccc

SEQ ID NO: 3157 - RNA, 22 nt, Populus trichocarpa
uuuucccaacuccacccauccc

SEQ ID NO: 3158 - RNA, 20 nt, Populus trichocarpa
acucucccucaaggcuucca

SEQ ID NO: 3159 - RNA, 20 nt, Populus trichocarpa
gcucucccucagggcuucca

SEQ ID NO: 3160 - RNA, 24 nt, Populus trichocarpa
caaaaguugcuggguuuggcuggg

SEQ ID NO: 3161 - RNA, 24 nt, Populus trichocarpa
caaaaguuguuggguuuggcuggg

SEQ ID NO: 3162 - RNA, 24 nt, Populus trichocarpa
caaaagcuguuggguuuggcuggg

SEQ ID NO: 3163 - RNA, 21 nt, Populus trichocarpa
uuacagugcccauugauuaag

SEQ ID NO: 3164 - RNA, 21 nt, Populus trichocarpa
uuacagugcccauugauuaag

SEQ ID NO: 3165 - RNA, 21 nt, Populus trichocarpa
uuacaauguccauugauuaag

SEQ ID NO: 3166 - RNA, 21 nt, Populus trichocarpa
uuacagaguccauugauuaag

SEQ ID NO: 3167 - RNA, 21 nt, Populus trichocarpa
uaguaauccuucuuugcaaag

SEQ ID NO: 3168 - RNA, 21 nt, Populus trichocarpa
uaguaauucuucuuugcaaaa

SEQ ID NO: 3169 - RNA, 21 nt, Populus trichocarpa
uaguaauucuucuuugcaaaa

SEQ ID NO: 3170 - RNA, 21 nt, Populus trichocarpa
aucucccucagaggcuuccaa

SEQ ID NO: 3171 - RNA, 21 nt, Populus trichocarpa
aucucccucagaggcuuccaa

SEQ ID NO: 3172 - RNA, 24 nt, Populus trichocarpa
ugacgugucuucuauuuuuaggga

SEQ ID NO: 3173 - RNA, 24 nt, Populus trichocarpa
ugacgugucuucuauuuuuaggga

SEQ ID NO: 3174 - RNA, 24 nt, Populus trichocarpa
ugacgugucuucuauuuuuaggga

SEQ ID NO: 3175 - RNA, 24 nt, Populus trichocarpa
ugacgugucuucuauuuuuaggaa

SEQ ID NO: 3176 - RNA, 24 nt, Populus trichocarpa
ugacgagucuucuauuuuuaggga

SEQ ID NO: 3177 - RNA, 24 nt, Populus trichocarpa
ugacaugucuucuauuuuuaggga

SEQ ID NO: 3178 - RNA, 24 nt, Populus trichocarpa
uaacgugucuccuauuuuuaggga

SEQ ID NO: 3179 - RNA, 24 nt, Populus trichocarpa
uaacgugucuccuauuuuuaggga

SEQ ID NO: 3180 - RNA, 24 nt, Populus trichocarpa
uaacgugucuccuauuuuuaggga

SEQ ID NO: 3181 - RNA, 24 nt, Populus trichocarpa
uaacgugucuccuauuuuuaggga

SEQ ID NO: 3182 - RNA, 24 nt, Populus trichocarpa
uaacgugucuccuauuuuuaggga

SEQ ID NO: 3183 - RNA, 24 nt, Populus trichocarpa
uaacgugucuccuauuuuuaggga

SEQ ID NO: 3184 - RNA, 24 nt, Populus trichocarpa
uaacgugucuccuauuuuuaggga

SEQ ID NO: 3185 - RNA, 24 nt, Populus trichocarpa
uaacgugucuccuauuuuuaggga

SEQ ID NO: 3186 - RNA, 24 nt, Populus trichocarpa
uaacgugucuccuauuuuuaggga

SEQ ID NO: 3187 - RNA, 24 nt, Populus trichocarpa
uaacgugucuccuauuuuuaggga

SEQ ID NO: 3188 - RNA, 24 nt, Populus trichocarpa
uaacgugucuccuauuuuuaggga

SEQ ID NO: 3189 - RNA, 24 nt, Populus trichocarpa
uaacgugucuccuauuuuuaggga

SEQ ID NO: 3190 - RNA, 24 nt, Populus trichocarpa
uaacgugucuccuauuuuuaggga

SEQ ID NO: 3191 - RNA, 22 nt, Populus trichocarpa
ugugauauugguccggcucauc

SEQ ID NO: 3192 - RNA, 24 nt, Populus trichocarpa
acuacuacaucauugacguugaac

SEQ ID NO: 3193 - RNA, 24 nt, Populus trichocarpa
acuacuacaucauugauguugaac

SEQ ID NO: 3194 - RNA, 24 nt, Populus trichocarpa
aggaccucacuuaacagcuuaagc

SEQ ID NO: 3195 - RNA, 24 nt, Populus trichocarpa
aggaccucacuuaacagcuuaagc

SEQ ID NO: 3196 - RNA, 24 nt, Populus trichocarpa
aggaccucacuuaacagcuuaagc

SEQ ID NO: 3197 - RNA, 24 nt, Populus trichocarpa
aagaccucaccuaacagcuuaagc

SEQ ID NO: 3198 - RNA, 24 nt, Populus trichocarpa
aggaccucaccuaacagcuuaagc

SEQ ID NO: 3199 - RNA, 17 nt, Populus trichocarpa
ccuacuccucccauucc

SEQ ID NO: 3200 - RNA, 22 nt, Pan troglodytes
aacccguagauccgaacuugug

SEQ ID NO: 3201 - RNA, 22 nt, Pan troglodytes
uacaguacugugauaacugaag

SEQ ID NO: 3202 - RNA, 23 nt, Pan troglodytes
agcagcauuguacagggcuauga

SEQ ID NO: 3203 - RNA, 20 nt, Pan troglodytes
ucaaaugcucagacuccugu

SEQ ID NO: 3204 - RNA, 24 nt, Pan troglodytes
aaaagugcuuacagugcagguagc

SEQ ID NO: 3205 - RNA, 21 nt, Pan troglodytes
uaaagugcugacagugcagau

SEQ ID NO: 3206 - RNA, 23 nt, Pan troglodytes
agcagcauuguacagggcuauca

SEQ ID NO: 3207 - RNA, 22 nt, Pan troglodytes
uuaaggcacgcggugaaugcca

SEQ ID NO: 3208 - RNA, 22 nt, Pan troglodytes
ucccugagacccuaacuuguga

SEQ ID NO: 3209 - RNA, 22 nt, Pan troglodytes
ucggauccgucugagcuuggcu

SEQ ID NO: 3210 - RNA, 22 nt, Pan troglodytes
ucacagugaaccggucucuuuu

SEQ ID NO: 3211 - RNA, 21 nt, Pan troglodytes
uugguccccuucaaccagcug

SEQ ID NO: 3212 - RNA, 23 nt, Pan troglodytes
uauggcuuuuuauuccuauguga

SEQ ID NO: 3213 - RNA, 23 nt, Pan troglodytes
acuccauuuguuuugaugaugga

SEQ ID NO: 3214 - RNA, 21 nt, Pan troglodytes
agugguuuuacccuaugguag

SEQ ID NO: 3215 - RNA, 22 nt, Pan troglodytes
ugagaugaagcacuguagcuca

SEQ ID NO: 3216 - RNA, 22 nt, Pan troglodytes
uacaguauagaugauguacuag

SEQ ID NO: 3217 - RNA, 24 nt, Pan troglodytes
guccaguuuucccaggaaucccuu

SEQ ID NO: 3218 - RNA, 20 nt, Pan troglodytes
guguguggaaaugcuucugc

SEQ ID NO: 3219 - RNA, 22 nt, Pan troglodytes
uagguuauccguguugccuucg

SEQ ID NO: 3220 - RNA, 22 nt, Pan troglodytes
uagcagcacauaaugguuugug

SEQ ID NO: 3221 - RNA, 22 nt, Pan troglodytes
uagcagcacaucaugguuuaca

SEQ ID NO: 3222 - RNA, 22 nt, Pan troglodytes
uagcagcacguaaauauuggcg

SEQ ID NO: 3223 - RNA, 20 nt, Pan troglodytes
acugcagugaaggcacuugu

SEQ ID NO: 3224 - RNA, 24 nt, Pan troglodytes
caaagugcuuacagugcagguagu

SEQ ID NO: 3225 - RNA, 22 nt, Pan troglodytes
uaaggugcaucuagugcagaua

SEQ ID NO: 3226 - RNA, 23 nt, Pan troglodytes
aacauucaacgcugucggugagu

SEQ ID NO: 3227 - RNA, 22 nt, Pan troglodytes
accaucgaccguugauuguacc

SEQ ID NO: 3228 - RNA, 24 nt, Pan troglodytes
aacauucauugcugucgguggguu

SEQ ID NO: 3229 - RNA, 22 nt, Pan troglodytes
aacauucaaccugucggugagu

SEQ ID NO: 3230 - RNA, 23 nt, Pan troglodytes
uauggcacugguagaauucacug

SEQ ID NO: 3231 - RNA, 22 nt, Pan troglodytes
uggacggagaacugauaagggu

SEQ ID NO: 3232 - RNA, 23 nt, Pan troglodytes
caaagaauucuccuuuugggcuu

SEQ ID NO: 3233 - RNA, 22 nt, Pan troglodytes
caucccuugcaugguggagggu

SEQ ID NO: 3234 - RNA, 22 nt, Pan troglodytes
ugauauguuugauauauuaggu

SEQ ID NO: 3235 - RNA, 22 nt, Pan troglodytes
uguaacagcaacuccaugugga

SEQ ID NO: 3236 - RNA, 22 nt, Pan troglodytes
uagguaguuucauguuguuggg

SEQ ID NO: 3237 - RNA, 22 nt, Pan troglodytes
uucaccaccuucuccacccagc

SEQ ID NO: 3238 - RNA, 19 nt, Pan troglodytes
gguccagaggggagauagg

SEQ ID NO: 3239 - RNA, 23 nt, Pan troglodytes
cccaguguucagacuaccuguuc

SEQ ID NO: 3240 - RNA, 23 nt, Pan troglodytes
ugugcaaaucuaugcaaaacuga

SEQ ID NO: 3241 - RNA, 23 nt, Pan troglodytes
ugugcaaauccaugcaaaacuga

SEQ ID NO: 3242 - RNA, 22 nt, Pan troglodytes
uaaagugcuuauagugcaggua

SEQ ID NO: 3243 - RNA, 22 nt, Pan troglodytes
uucccuuugucauccuaugccu

SEQ ID NO: 3244 - RNA, 22 nt, Pan troglodytes
uccuucauuccaccggagucug

SEQ ID NO: 3245 - RNA, 22 nt, Pan troglodytes
uagcuuaucagacugauguuga

SEQ ID NO: 3246 - RNA, 21 nt, Pan troglodytes
acagcaggcacagacaggcag

SEQ ID NO: 3247 - RNA, 21 nt, Pan troglodytes
augaccuaugaauugacagac

SEQ ID NO: 3248 - RNA, 21 nt, Pan troglodytes
uaaucucagcuggcaacugug

SEQ ID NO: 3249 - RNA, 21 nt, Pan troglodytes
uugugcuugaucuaaccaugu

SEQ ID NO: 3250 - RNA, 22 nt, Pan troglodytes
aagcugccaguugaagaacugu

SEQ ID NO: 3251 - RNA, 21 nt, Pan troglodytes
ccacaccguaucugacacuuu

SEQ ID NO: 3252 - RNA, 21 nt, Pan troglodytes
ugucaguuugucaaauacccc

SEQ ID NO: 3253 - RNA, 23 nt, Pan troglodytes
caagucacuagugguuccguuua

SEQ ID NO: 3254 - RNA, 21 nt, Pan troglodytes
aucacauugccagggauuucc

SEQ ID NO: 3255 - RNA, 23 nt, Pan troglodytes
aucacauugccagggauuaccac

SEQ ID NO: 3256 - RNA, 22 nt, Pan troglodytes
uggcucaguucagcaggaacag

SEQ ID NO: 3257 - RNA, 22 nt, Pan troglodytes
cauugcacuugucucggucuga

SEQ ID NO: 3258 - RNA, 22 nt, Pan troglodytes
uucaaguaauccaggauaggcu

SEQ ID NO: 3259 - RNA, 22 nt, Pan troglodytes
uucacaguggcuaaguuccgcc

SEQ ID NO: 3260 - RNA, 22 nt, Pan troglodytes
aaggagcucacagucuauugag

SEQ ID NO: 3261 - RNA, 22 nt, Pan troglodytes
cuagcaccaucugaaaucgguu

SEQ ID NO: 3262 - RNA, 20 nt, Pan troglodytes
uagcaccauuugaaaucagu

SEQ ID NO: 3263 - RNA, 22 nt, Pan troglodytes
cuuucagucggauguuugcagc

SEQ ID NO: 3264 - RNA, 22 nt, Pan troglodytes
uguaaacauccucgacuggaag

SEQ ID NO: 3265 - RNA, 21 nt, Pan troglodytes
uguaaacauccuacacucagc

SEQ ID NO: 3266 - RNA, 23 nt, Pan troglodytes
uguaaacauccuacacucucagc

SEQ ID NO: 3267 - RNA, 22 nt, Pan troglodytes
uguaaacauccccgacuggaag

SEQ ID NO: 3268 - RNA, 21 nt, Pan troglodytes
ggcaagaugcuggcauagcug

SEQ ID NO: 3269 - RNA, 21 nt, Pan troglodytes
uauugcacauuacuaaguugc

SEQ ID NO: 3270 - RNA, 19 nt, Pan troglodytes
gugcauuguaguugcauug

SEQ ID NO: 3271 - RNA, 22 nt, Pan troglodytes
uggcagugucuuagcugguugu

SEQ ID NO: 3272 - RNA, 21 nt, Pan troglodytes
uggaagacuagugauuuuguu

SEQ ID NO: 3273 - RNA, 23 nt, Pan troglodytes
ucuuugguuaucuagcuguauga

SEQ ID NO: 3274 - RNA, 22 nt, Pan troglodytes
uauugcacuugucccggccugu

SEQ ID NO: 3275 - RNA, 22 nt, Pan troglodytes
aaagugcuguucgugcagguag

SEQ ID NO: 3276 - RNA, 22 nt, Pan troglodytes
uucaacggguauuuauugagca

SEQ ID NO: 3277 - RNA, 22 nt, Pan troglodytes
uuuggcacuagcacauuuuugc

SEQ ID NO: 3278 - RNA, 22 nt, Pan troglodytes
ugagguaguaaguuguauuguu

SEQ ID NO: 3279 - RNA, 22 nt, Pan troglodytes
aacccguagauccgaucuugug

SEQ ID NO: 3280 - RNA, 22 nt, Rhesus lymphocryptovirus
uaaccugaucagccccgggguu

SEQ ID NO: 3281 - RNA, 22 nt, Rhesus lymphocryptovirus
uagugcgccggugaccugauag

SEQ ID NO: 3282 - RNA, 22 nt, Rhesus lymphocryptovirus
ugacacucgauaggauacgggg

SEQ ID NO: 3283 - RNA, 22 nt, Rhesus lymphocryptovirus
aacggugcauggacuggcuaga

SEQ ID NO: 3284 - RNA, 22 nt, Rhesus lymphocryptovirus
agaccagaccaugcacaguggg

SEQ ID NO: 3285 - RNA, 22 nt, Rhesus lymphocryptovirus
gaucauagccaguguccaggga

SEQ ID NO: 3286 - RNA, 21 nt, Rhesus lymphocryptovirus
ucgcacaucaggcugaacgac

SEQ ID NO: 3287 - RNA, 23 nt, Rhesus lymphocryptovirus
ucggacggucuggugcgcuugau

SEQ ID NO: 3288 - RNA, 24 nt, Rhesus lymphocryptovirus
uccuguagaguaugggugugguuu

SEQ ID NO: 3289 - RNA, 22 nt, Rhesus lymphocryptovirus
caugaaacacauggccuguucc

SEQ ID NO: 3290 - RNA, 20 nt, Rhesus lymphocryptovirus
agcaggcaugucuucauucc

SEQ ID NO: 3291 - RNA, 23 nt, Rhesus lymphocryptovirus
uaucuuuugcgggggaauuucca

SEQ ID NO: 3292 - RNA, 23 nt, Rhesus lymphocryptovirus
cgcaccucgccgucucuacugcu

SEQ ID NO: 3293 - RNA, 22 nt, Rhesus lymphocryptovirus
caccacacgauccacuaggucu

SEQ ID NO: 3294 - RNA, 21 nt, Rhesus lymphocryptovirus
accuaguaauugugcgguguu

SEQ ID NO: 3295 - RNA, 22 nt, Rhesus lymphocryptovirus
cgcaccacuuuucacuaggugu

SEQ ID NO: 3296 - RNA, 22 nt, Rhesus lymphocryptovirus
aaccuagugccggugaugugcu

SEQ ID NO: 3297 - RNA, 22 nt, Rhesus lymphocryptovirus
uagcaccgcuauccacuauguc

SEQ ID NO: 3298 - RNA, 23 nt, Rhesus lymphocryptovirus
uuuaguggaagugacgugcugug

SEQ ID NO: 3299 - RNA, 22 nt, Rhesus lymphocryptovirus
cgagguaaacaucggcuuacug

SEQ ID NO: 3300 - RNA, 24 nt, Rhesus lymphocryptovirus
uaaggugaauauagcugcccauug

SEQ ID NO: 3301 - RNA, 23 nt, Rhesus lymphocryptovirus
ucgaugcaugguccccccuuagu

SEQ ID NO: 3302 - RNA, 22 nt, Rattus norvegicus
ugagguaguagguuguauaguu

SEQ ID NO: 3303 - RNA, 22 nt, Rattus norvegicus
ugagguaguagguugugugguu

SEQ ID NO: 3304 - RNA, 22 nt, Rattus norvegicus
ugagguaguagguuguaugguu

SEQ ID NO: 3305 - RNA, 21 nt, Rattus norvegicus
agagguaguagguugcauagu

SEQ ID NO: 3306 - RNA, 22 nt, Rattus norvegicus
cuauacgaccugcugccuuucu

SEQ ID NO: 3307 - RNA, 21 nt, Rattus norvegicus
ugagguaggagguuguauagu

SEQ ID NO: 3308 - RNA, 22 nt, Rattus norvegicus
ugagguaguagauuguauaguu

SEQ ID NO: 3309 - RNA, 21 nt, Rattus norvegicus
ugagguaguaguuugugcugu

SEQ ID NO: 3310 - RNA, 21 nt, Rattus norvegicus
uggaauguaaagaagugugua

SEQ ID NO: 3311 - RNA, 22 nt, Rattus norvegicus
gcacauacuucuuuauguaccc

SEQ ID NO: 3312 - RNA, 22 nt, Rattus norvegicus
aacccguagauccgaacuugug

SEQ ID NO: 3313 - RNA, 22 nt, Rattus norvegicus
uacaguacugugauaacugaag

SEQ ID NO: 3314 - RNA, 22 nt, Rattus norvegicus
uacaguacugugauagcugaag

SEQ ID NO: 3315 - RNA, 23 nt, Rattus norvegicus
agcagcauuguacagggcuauga

SEQ ID NO: 3316 - RNA, 21 nt, Rattus norvegicus
uaaagugcugacagugcagau

SEQ ID NO: 3317 - RNA, 23 nt, Rattus norvegicus
agcagcauuguacagggcuauca

SEQ ID NO: 3318 - RNA, 23 nt, Rattus norvegicus
uacccuguagauccgaauuugug

SEQ ID NO: 3319 - RNA, 22 nt, Rattus norvegicus
cccuguagaaccgaauuugugu

SEQ ID NO: 3320 - RNA, 23 nt, Rattus norvegicus
uggagugugacaaugguguuugu

SEQ ID NO: 3321 - RNA, 22 nt, Rattus norvegicus
uuaaggcacgcggugaaugcca

SEQ ID NO: 3322 - RNA, 23 nt, Rattus norvegicus
ucccugagacccuuuaaccugug

SEQ ID NO: 3323 - RNA, 22 nt, Rattus norvegicus
ucccugagacccuaacuuguga

SEQ ID NO: 3324 - RNA, 21 nt, Rattus norvegicus
ucguaccgugaguaauaaugc

SEQ ID NO: 3325 - RNA, 21 nt, Rattus norvegicus
cauuauuacuuuugguacgcg

SEQ ID NO: 3326 - RNA, 22 nt, Rattus norvegicus
ucggauccgucugagcuuggcu

SEQ ID NO: 3327 - RNA, 22 nt, Rattus norvegicus
ucacagugaaccggucucuuuu

SEQ ID NO: 3328 - RNA, 22 nt, Rattus norvegicus
ucacagugaaccggucucuuuc

SEQ ID NO: 3329 - RNA, 22 nt, Rattus norvegicus
cuuuuugcggucugggcuugcu

SEQ ID NO: 3330 - RNA, 22 nt, Rattus norvegicus
aagcccuuaccccaaaaagcau

SEQ ID NO: 3331 - RNA, 22 nt, Rattus norvegicus
cagugcaauguuaaaagggcau

SEQ ID NO: 3332 - RNA, 22 nt, Rattus norvegicus
cagugcaaugaugaaagggcau

SEQ ID NO: 3333 - RNA, 22 nt, Rattus norvegicus
uaacagucuacagccauggucg

SEQ ID NO: 3334 - RNA, 22 nt, Rattus norvegicus
uugguccccuucaaccagcugu

SEQ ID NO: 3335 - RNA, 21 nt, Rattus norvegicus
uugguccccuucaaccagcua

SEQ ID NO: 3336 - RNA, 21 nt, Rattus norvegicus
ugugacugguugaccagaggg

SEQ ID NO: 3337 - RNA, 23 nt, Rattus norvegicus
uauggcuuuuuauuccuauguga

SEQ ID NO: 3338 - RNA, 22 nt, Rattus norvegicus
uauggcuuuucauuccuaugug

SEQ ID NO: 3339 - RNA, 23 nt, Rattus norvegicus
acuccauuuguuuugaugaugga

SEQ ID NO: 3340 - RNA, 22 nt, Rattus norvegicus
uauugcuuaagaauacgcguag

SEQ ID NO: 3341 - RNA, 17 nt, Rattus norvegicus
agcugguguugugaauc

SEQ ID NO: 3342 - RNA, 18 nt, Rattus norvegicus
ucuacagugcacgugucu

SEQ ID NO: 3343 - RNA, 21 nt, Rattus norvegicus
agugguuuuacccuaugguag

SEQ ID NO: 3344 - RNA, 24 nt, Rattus norvegicus
uaccacaggguagaaccacggaca

SEQ ID NO: 3345 - RNA, 22 nt, Rattus norvegicus
uaacacugucugguaaagaugg

SEQ ID NO: 3346 - RNA, 23 nt, Rattus norvegicus
uguaguguuuccuacuuuaugga

SEQ ID NO: 3347 - RNA, 20 nt, Rattus norvegicus
cauaaaguagaaagcacuac

SEQ ID NO: 3348 - RNA, 22 nt, Rattus norvegicus
ugagaugaagcacuguagcuca

SEQ ID NO: 3349 - RNA, 22 nt, Rattus norvegicus
uacaguauagaugauguacuag

SEQ ID NO: 3350 - RNA, 24 nt, Rattus norvegicus
guccaguuuucccaggaaucccuu

SEQ ID NO: 3351 - RNA, 22 nt, Rattus norvegicus
ugagaacugaauuccauggguu

SEQ ID NO: 3352 - RNA, 22 nt, Rattus norvegicus
ucagugcaucacagaacuuugu

SEQ ID NO: 3353 - RNA, 22 nt, Rattus norvegicus
ucucccaacccuuguaccagug

SEQ ID NO: 3354 - RNA, 22 nt, Rattus norvegicus
acuagacugaggcuccuugagg

SEQ ID NO: 3355 - RNA, 22 nt, Rattus norvegicus
ucgaggagcucacagucuagua

SEQ ID NO: 3356 - RNA, 22 nt, Rattus norvegicus
ucagugcaugacagaacuuggg

SEQ ID NO: 3357 - RNA, 20 nt, Rattus norvegicus
uugcauagucacaaaaguga

SEQ ID NO: 3358 - RNA, 22 nt, Rattus norvegicus
uagguuauccguguugccuucg

SEQ ID NO: 3359 - RNA, 22 nt, Rattus norvegicus
uagcagcacaucaugguuuaca

SEQ ID NO: 3360 - RNA, 22 nt, Rattus norvegicus
uagcagcacguaaauauuggcg

SEQ ID NO: 3361 - RNA, 24 nt, Rattus norvegicus
caaagugcuuacagugcagguagu

SEQ ID NO: 3362 - RNA, 22 nt, Rattus norvegicus
uaaggugcaucuagugcagaua

SEQ ID NO: 3363 - RNA, 23 nt, Rattus norvegicus
aacauucaacgcugucggugagu

SEQ ID NO: 3364 - RNA, 22 nt, Rattus norvegicus
accaucgaccguugauuguacc

SEQ ID NO: 3365 - RNA, 22 nt, Rattus norvegicus
aacauucauugcugucgguggg

SEQ ID NO: 3366 - RNA, 22 nt, Rattus norvegicus
aacauucaaccugucggugagu

SEQ ID NO: 3367 - RNA, 23 nt, Rattus norvegicus
uauggcacugguagaauucacug

SEQ ID NO: 3368 - RNA, 22 nt, Rattus norvegicus
uggacggagaacugauaagggu

SEQ ID NO: 3369 - RNA, 18 nt, Rattus norvegicus
uggagagaaaggcaguuc

SEQ ID NO: 3370 - RNA, 23 nt, Rattus norvegicus
caaagaauucuccuuuugggcuu

SEQ ID NO: 3371 - RNA, 21 nt, Rattus norvegicus
ucgugucuuguguugcagccg

SEQ ID NO: 3372 - RNA, 23 nt, Rattus norvegicus
gugccuacugagcugauaucagu

SEQ ID NO: 3373 - RNA, 22 nt, Rattus norvegicus
ugauauguuugauauauuaggu

SEQ ID NO: 3374 - RNA, 22 nt, Rattus norvegicus
caacggaaucccaaaagcagcu

SEQ ID NO: 3375 - RNA, 21 nt, Rattus norvegicus
cugaccuaugaauugacagcc

SEQ ID NO: 3376 - RNA, 21 nt, Rattus norvegicus
aacuggccuacaaagucccag

SEQ ID NO: 3377 - RNA, 22 nt, Rattus norvegicus
uguaacagcaacuccaugugga

SEQ ID NO: 3378 - RNA, 21 nt, Rattus norvegicus
uagcagcacagaaauauuggc

SEQ ID NO: 3379 - RNA, 21 nt, Rattus norvegicus
uagguaguuucauguuguugg

SEQ ID NO: 3380 - RNA, 21 nt, Rattus norvegicus
uagguaguuuccuguuguugg

SEQ ID NO: 3381 - RNA, 23 nt, Rattus norvegicus
cccaguguucagacuaccuguuc

SEQ ID NO: 3382 - RNA, 23 nt, Rattus norvegicus
ugugcaaaucuaugcaaaacuga

SEQ ID NO: 3383 - RNA, 23 nt, Rattus norvegicus
ugugcaaauccaugcaaaacuga

SEQ ID NO: 3384 - RNA, 22 nt, Rattus norvegicus
uaacacugucugguaacgaugu

SEQ ID NO: 3385 - RNA, 23 nt, Rattus norvegicus
uaauacugccugguaaugaugac

SEQ ID NO: 3386 - RNA, 22 nt, Rattus norvegicus
uaauacugccggguaaugaugg

SEQ ID NO: 3387 - RNA, 22 nt, Rattus norvegicus
gugaaauguuuaggaccacuag

SEQ ID NO: 3388 - RNA, 22 nt, Rattus norvegicus
uucccuuugucauccuaugccu

SEQ ID NO: 3389 - RNA, 22 nt, Rattus norvegicus
uccuucauuccaccggagucug

SEQ ID NO: 3390 - RNA, 22 nt, Rattus norvegicus
uggaauguaaggaagugugugg

SEQ ID NO: 3391 - RNA, 23 nt, Rattus norvegicus
gcuucuccuggcucuccucccuu

SEQ ID NO: 3392 - RNA, 22 nt, Rattus norvegicus
auaagacgagcaaaaagcuugu

SEQ ID NO: 3393 - RNA, 23 nt, Rattus norvegicus
uaaagugcuuauagugcagguag

SEQ ID NO: 3394 - RNA, 21 nt, Rattus norvegicus
acugcauuacgagcacuuaca

SEQ ID NO: 3395 - RNA, 21 nt, Rattus norvegicus
caaagugcucauagugcaggu

SEQ ID NO: 3396 - RNA, 21 nt, Rattus norvegicus
acugcagugugagcacuucug

SEQ ID NO: 3397 - RNA, 22 nt, Rattus norvegicus
uagcuuaucagacugauguuga

SEQ ID NO: 3398 - RNA, 22 nt, Rattus norvegicus
cugugcgugugacagcggcuga

SEQ ID NO: 3399 - RNA, 22 nt, Rattus norvegicus
uucccuuugucauccuuugccu

SEQ ID NO: 3400 - RNA, 21 nt, Rattus norvegicus
uaacagucuccagucacggcc

SEQ ID NO: 3401 - RNA, 21 nt, Rattus norvegicus
acagcaggcacagacaggcag

SEQ ID NO: 3402 - RNA, 21 nt, Rattus norvegicus
augaccuaugauuugacagac

SEQ ID NO: 3403 - RNA, 21 nt, Rattus norvegicus
uaaucucagcuggcaacugug

SEQ ID NO: 3404 - RNA, 24 nt, Rattus norvegicus
uacugcaucaggaacugacuggau

SEQ ID NO: 3405 - RNA, 21 nt, Rattus norvegicus
uugugcuugaucuaaccaugu

SEQ ID NO: 3406 - RNA, 21 nt, Rattus norvegicus
ugauuguccaaacgcaauucu

SEQ ID NO: 3407 - RNA, 22 nt, Rattus norvegicus
aagcugccaguugaagaacugu

SEQ ID NO: 3408 - RNA, 21 nt, Rattus norvegicus
aguucuucaguggcaagcuuu

SEQ ID NO: 3409 - RNA, 23 nt, Rattus norvegicus
agcuacauugucugcuggguuuc

SEQ ID NO: 3410 - RNA, 24 nt, Rattus norvegicus
agcuacaucuggcuacugggucuc

SEQ ID NO: 3411 - RNA, 21 nt, Rattus norvegicus
ugucaguuugucaaauacccc

SEQ ID NO: 3412 - RNA, 23 nt, Rattus norvegicus
caagucacuagugguuccguuua

SEQ ID NO: 3413 - RNA, 21 nt, Rattus norvegicus
aucacauugccagggauuucc

SEQ ID NO: 3414 - RNA, 21 nt, Rattus norvegicus
aucacauugccagggauuacc

SEQ ID NO: 3415 - RNA, 22 nt, Rattus norvegicus
uggcucaguucagcaggaacag

SEQ ID NO: 3416 - RNA, 22 nt, Rattus norvegicus
cauugcacuugucucggucuga

SEQ ID NO: 3417 - RNA, 21 nt, Rattus norvegicus
uucaaguaauccaggauaggc

SEQ ID NO: 3418 - RNA, 22 nt, Rattus norvegicus
uucaaguaauucaggauagguu

SEQ ID NO: 3419 - RNA, 21 nt, Rattus norvegicus
uucacaguggcuaaguuccgc

SEQ ID NO: 3420 - RNA, 21 nt, Rattus norvegicus
uucacaguggcuaaguucugc

SEQ ID NO: 3421 - RNA, 22 nt, Rattus norvegicus
aaggagcucacagucuauugag

SEQ ID NO: 3422 - RNA, 23 nt, Rattus norvegicus
cucaaacuaugggggcacuuuuu

SEQ ID NO: 3423 - RNA, 23 nt, Rattus norvegicus
aaagugcuuccacuuugugugcc

SEQ ID NO: 3424 - RNA, 22 nt, Rattus norvegicus
caucaaaguggaggcccucucu

SEQ ID NO: 3425 - RNA, 23 nt, Rattus norvegicus
aagugccgccagguuuugagugu

SEQ ID NO: 3426 - RNA, 22 nt, Rattus norvegicus
acucaaacugggggcucuuuug

SEQ ID NO: 3427 - RNA, 21 nt, Rattus norvegicus
agggcccccccucaauccugu

SEQ ID NO: 3428 - RNA, 23 nt, Rattus norvegicus
auguaugugugcauguaugcaug

SEQ ID NO: 3429 - RNA, 22 nt, Rattus norvegicus
ggcagaggagggcuguucuucc

SEQ ID NO: 3430 - RNA, 22 nt, Rattus norvegicus
ugguuuaccgucccacauacau

SEQ ID NO: 3431 - RNA, 21 nt, Rattus norvegicus
uagcaccaucugaaaucgguu

SEQ ID NO: 3432 - RNA, 23 nt, Rattus norvegicus
uagcaccauuugaaaucaguguu

SEQ ID NO: 3433 - RNA, 20 nt, Rattus norvegicus
uagcaccauuugaaaucggu

SEQ ID NO: 3434 - RNA, 22 nt, Rattus norvegicus
ugaccgauuucuccugguguuc

SEQ ID NO: 3435 - RNA, 22 nt, Rattus norvegicus
uaugcaagggcaagcucucuuc

SEQ ID NO: 3436 - RNA, 25 nt, Rattus norvegicus
cagugcaauaguauugucaaagcau

SEQ ID NO: 3437 - RNA, 22 nt, Rattus norvegicus
cuuucagucggauguuugcagc

SEQ ID NO: 3438 - RNA, 22 nt, Rattus norvegicus
uguaaacauccucgacuggaag

SEQ ID NO: 3439 - RNA, 22 nt, Rattus norvegicus
uguaaacauccuacacucagcu

SEQ ID NO: 3440 - RNA, 23 nt, Rattus norvegicus
uguaaacauccuacacucucagc

SEQ ID NO: 3441 - RNA, 22 nt, Rattus norvegicus
uguaaacauccccgacuggaag

SEQ ID NO: 3442 - RNA, 20 nt, Rattus norvegicus
uguaaacauccuugacugga

SEQ ID NO: 3443 - RNA, 22 nt, Rattus norvegicus
aggcaagaugcuggcauagcug

SEQ ID NO: 3444 - RNA, 21 nt, Rattus norvegicus
uauugcacauuacuaaguugc

SEQ ID NO: 3445 - RNA, 23 nt, Rattus norvegicus
aaaagcuggguugagagggcgaa

SEQ ID NO: 3446 - RNA, 20 nt, Rattus norvegicus
aaacaugaagcgcugcaaca

SEQ ID NO: 3447 - RNA, 22 nt, Rattus norvegicus
gcacauuacacggucgaccucu

SEQ ID NO: 3448 - RNA, 22 nt, Rattus norvegicus
ccacugccccaggugcugcugg

SEQ ID NO: 3449 - RNA, 23 nt, Rattus norvegicus
cgcauccccuagggcauuggugu

SEQ ID NO: 3450 - RNA, 23 nt, Rattus norvegicus
ccuaguaggugcucaguaagugu

SEQ ID NO: 3451 - RNA, 21 nt, Rattus norvegicus
ccucugggcccuuccuccagu

SEQ ID NO: 3452 - RNA, 19 nt, Rattus norvegicus
ccuugaggggcaugagggu

SEQ ID NO: 3453 - RNA, 22 nt, Rattus norvegicus
cuggcccucucugcccuuccgu

SEQ ID NO: 3454 - RNA, 22 nt, Rattus norvegicus
aacacacccagcuaaccuuuuu

SEQ ID NO: 3455 - RNA, 19 nt, Rattus norvegicus
gugcauuguaguugcauug

SEQ ID NO: 3456 - RNA, 23 nt, Rattus norvegicus
gcaaagcacagggccugcagaga

SEQ ID NO: 3457 - RNA, 21 nt, Rattus norvegicus
gccccugggccuauccuagaa

SEQ ID NO: 3458 - RNA, 20 nt, Rattus norvegicus
guggugugcuaguuacuuuu

SEQ ID NO: 3459 - RNA, 23 nt, Rattus norvegicus
ucaagagcaauaacgaaaaaugu

SEQ ID NO: 3460 - RNA, 21 nt, Rattus norvegicus
ucacccuuccauaucuagucu

SEQ ID NO: 3461 - RNA, 23 nt, Rattus norvegicus
uucagcuccuauaugaugccuuu

SEQ ID NO: 3462 - RNA, 23 nt, Rattus norvegicus
uccagcaucagugauuuuguuga

SEQ ID NO: 3463 - RNA, 21 nt, Rattus norvegicus
ucccuguccuccaggagcuca

SEQ ID NO: 3464 - RNA, 23 nt, Rattus norvegicus
uccgucucaguuacuuuauagcc

SEQ ID NO: 3465 - RNA, 21 nt, Rattus norvegicus
ucgaucggucggucggucagu

SEQ ID NO: 3466 - RNA, 24 nt, Rattus norvegicus
ucucacacagaaaucgcacccguc

SEQ ID NO: 3467 - RNA, 20 nt, Rattus norvegicus
ucucccuccgugugcccaga

SEQ ID NO: 3468 - RNA, 23 nt, Rattus norvegicus
ugaucuagccaaagccugaccgu

SEQ ID NO: 3469 - RNA, 21 nt, Rattus norvegicus
ugcugaccccuaguccagugc

SEQ ID NO: 3470 - RNA, 23 nt, Rattus norvegicus
ugucugccugagugccugccucu

SEQ ID NO: 3471 - RNA, 19 nt, Rattus norvegicus
ugucccucugggucgccca

SEQ ID NO: 3472 - RNA, 22 nt, Rattus norvegicus
cagcccugcugucuuaaccucu

SEQ ID NO: 3473 - RNA, 23 nt, Rattus norvegicus
uggcagugucuuagcugguuguu

SEQ ID NO: 3474 - RNA, 23 nt, Rattus norvegicus
uaggcaguguaauuagcugauug

SEQ ID NO: 3475 - RNA, 23 nt, Rattus norvegicus
aggcaguguaguuagcugauugc

SEQ ID NO: 3476 - RNA, 24 nt, Rattus norvegicus
uucacaaagcccauacacuuucac

SEQ ID NO: 3477 - RNA, 24 nt, Rattus norvegicus
ucccugaggagcccuuugagccug

SEQ ID NO: 3478 - RNA, 21 nt, Rattus norvegicus
agaguaguagguugcauagua

SEQ ID NO: 3479 - RNA, 22 nt, Rattus norvegicus
uuaucagaaucuccagggguac

SEQ ID NO: 3480 - RNA, 21 nt, Rattus norvegicus
aauugcacgguauccaucugu

SEQ ID NO: 3481 - RNA, 22 nt, Rattus norvegicus
cggguggaucacgaugcaauuu

SEQ ID NO: 3482 - RNA, 22 nt, Rattus norvegicus
uaaugccccuaaaaauccuuau

SEQ ID NO: 3483 - RNA, 20 nt, Rattus norvegicus
aauaauacaugguugaucuu

SEQ ID NO: 3484 - RNA, 21 nt, Rattus norvegicus
agaucgaccguguuauauucg

SEQ ID NO: 3485 - RNA, 23 nt, Rattus norvegicus
gccugcugggguggaaccugguu

SEQ ID NO: 3486 - RNA, 22 nt, Rattus norvegicus
auauaauacaaccugcuaagug

SEQ ID NO: 3487 - RNA, 20 nt, Rattus norvegicus
aucguagaggaaaauccacg

SEQ ID NO: 3488 - RNA, 21 nt, Rattus norvegicus
gguagauucuccuucuaugag

SEQ ID NO: 3489 - RNA, 20 nt, Rattus norvegicus
aucauagaggaacauccacu

SEQ ID NO: 3490 - RNA, 21 nt, Rattus norvegicus
guggauauuccuucuaugguu

SEQ ID NO: 3491 - RNA, 20 nt, Rattus norvegicus
aacauagaggaaauuucacg

SEQ ID NO: 3492 - RNA, 22 nt, Rattus norvegicus
aucacacaaaggcaacuuuugg

SEQ ID NO: 3493 - RNA, 22 nt, Rattus norvegicus
cuccugacuccagguccugugu

SEQ ID NO: 3494 - RNA, 19 nt, Rattus norvegicus
ugguagacuauggaacgua

SEQ ID NO: 3495 - RNA, 19 nt, Rattus norvegicus
uauacaagggcaagcucuc

SEQ ID NO: 3496 - RNA, 21 nt, Rattus norvegicus
gaaguuguucgugguggauuc

SEQ ID NO: 3497 - RNA, 21 nt, Rattus norvegicus
aaucauucacggacaacacuu

SEQ ID NO: 3498 - RNA, 22 nt, Rattus norvegicus
agaucagaaggugacuguggcu

SEQ ID NO: 3499 - RNA, 20 nt, Rattus norvegicus
aauguugcucggugaacccc

SEQ ID NO: 3500 - RNA, 20 nt, Rattus norvegicus
agguuacccgagcaacuuug

SEQ ID NO: 3501 - RNA, 23 nt, Rattus norvegicus
acuucaccugguccacuagccgu

SEQ ID NO: 3502 - RNA, 21 nt, Rattus norvegicus
ggccucauuaaauguuuguug

SEQ ID NO: 3503 - RNA, 22 nt, Rattus norvegicus
acuggacuuggagucagaaggc

SEQ ID NO: 3504 - RNA, 22 nt, Rattus norvegicus
cagcagcaauucauguuuugga

SEQ ID NO: 3505 - RNA, 22 nt, Rattus norvegicus
uaauacugucugguaaugccgu

SEQ ID NO: 3506 - RNA, 21 nt, Rattus norvegicus
ugucuugcaggccgucaugca

SEQ ID NO: 3507 - RNA, 22 nt, Rattus norvegicus
aucaugaugggcuccucggugu

SEQ ID NO: 3508 - RNA, 22 nt, Rattus norvegicus
uugcauauguaggaugucccau

SEQ ID NO: 3509 - RNA, 22 nt, Rattus norvegicus
uggcaguguauuguuagcuggu

SEQ ID NO: 3510 - RNA, 22 nt, Rattus norvegicus
uuuuugcgauguguuccuaaug

SEQ ID NO: 3511 - RNA, 22 nt, Rattus norvegicus
aaaccguuaccauuacugaguu

SEQ ID NO: 3512 - RNA, 23 nt, Rattus norvegicus
ucacuccuccccucccgucuugu

SEQ ID NO: 3513 - RNA, 22 nt, Rattus norvegicus
agaggcuggccgugaugaauuc

SEQ ID NO: 3514 - RNA, 21 nt, Rattus norvegicus
aaucguacagggucauccacu

SEQ ID NO: 3515 - RNA, 23 nt, Rattus norvegicus
aaugacaucacauauauggcagc

SEQ ID NO: 3516 - RNA, 21 nt, Rattus norvegicus
ugaaggucuacugugugccag

SEQ ID NO: 3517 - RNA, 21 nt, Rattus norvegicus
ugaaacauacacgggaaaccu

SEQ ID NO: 3518 - RNA, 22 nt, Rattus norvegicus
cagcagcacacugugguuugua

SEQ ID NO: 3519 - RNA, 21 nt, Rattus norvegicus
uuaagacuugcagugauguuu

SEQ ID NO: 3520 - RNA, 22 nt, Rattus norvegicus
aauccuuugucccugggugaaa

SEQ ID NO: 3521 - RNA, 20 nt, Rattus norvegicus
uagcagcgggaacaguacug

SEQ ID NO: 3522 - RNA, 20 nt, Rattus norvegicus
gucaacacuugcugguuucc

SEQ ID NO: 3523 - RNA, 22 nt, Rattus norvegicus
ggagaaauuauccuuggugugu

SEQ ID NO: 3524 - RNA, 20 nt, Rattus norvegicus
aggucagaggucgauccugg

SEQ ID NO: 3525 - RNA, 23 nt, Rattus norvegicus
aagggauucugauguuggucaca

SEQ ID NO: 3526 - RNA, 21 nt, Rattus norvegicus
ugugacagauugauaacugaa

SEQ ID NO: 3527 - RNA, 21 nt, Rattus norvegicus
cucggggaucaucaugucacg

SEQ ID NO: 3528 - RNA, 21 nt, Rattus norvegicus
aaacauucgcggugcacuucu

SEQ ID NO: 3529 - RNA, 22 nt, Rattus norvegicus
uauucauuuacuccccagccua

SEQ ID NO: 3530 - RNA, 21 nt, Rattus norvegicus
uggaagacuagugauuuuguu

SEQ ID NO: 3531 - RNA, 22 nt, Rattus norvegicus
caacaaaucacagucugccaua

SEQ ID NO: 3532 - RNA, 21 nt, Rattus norvegicus
uggaagacuugugauuuuguu

SEQ ID NO: 3533 - RNA, 23 nt, Rattus norvegicus
ucuuugguuaucuagcuguauga

SEQ ID NO: 3534 - RNA, 21 nt, Rattus norvegicus
uauugcacuugucccggccug

SEQ ID NO: 3535 - RNA, 23 nt, Rattus norvegicus
caaagugcuguucgugcagguag

SEQ ID NO: 3536 - RNA, 23 nt, Rattus norvegicus
uuuggcacuagcacauuuuugcu

SEQ ID NO: 3537 - RNA, 22 nt, Rattus norvegicus
ugagguaguaaguuguauuguu

SEQ ID NO: 3538 - RNA, 22 nt, Rattus norvegicus
aacccguagauccgaucuugug

SEQ ID NO: 3539 - RNA, 22 nt, Rattus norvegicus
cacccguagaaccgaccuugcg

SEQ ID NO: 3540 - RNA, 20 nt, Sorghum bicolor
ugacagaagagagugagcac

SEQ ID NO: 3541 - RNA, 20 nt, Sorghum bicolor
ugacagaagagagugagcac

SEQ ID NO: 3542 - RNA, 20 nt, Sorghum bicolor
ugacagaagagagugagcac

SEQ ID NO: 3543 - RNA, 21 nt, Sorghum bicolor
ugacagaagagagagagcaca

SEQ ID NO: 3544 - RNA, 20 nt, Sorghum bicolor
ugacagaagagagcgagcac

SEQ ID NO: 3545 - RNA, 21 nt, Sorghum bicolor
uuuggauugaagggagcucug

SEQ ID NO: 3546 - RNA, 21 nt, Sorghum bicolor
cuuggauugaagggagcuccu

SEQ ID NO: 3547 - RNA, 21 nt, Sorghum bicolor
ugccuggcucccuguaugcca

SEQ ID NO: 3548 - RNA, 21 nt, Sorghum bicolor
ugccuggcucccuguaugcca

SEQ ID NO: 3549 - RNA, 21 nt, Sorghum bicolor
ugccuggcucccuguaugcca

SEQ ID NO: 3550 - RNA, 21 nt, Sorghum bicolor
ugccuggcucccuguaugcca

SEQ ID NO: 3551 - RNA, 21 nt, Sorghum bicolor
ugccuggcucccuguaugcca

SEQ ID NO: 3552 - RNA, 21 nt, Sorghum bicolor
uggagaagcagggcacgugca

SEQ ID NO: 3553 - RNA, 21 nt, Sorghum bicolor
uggagaagcagggcacgugcu

SEQ ID NO: 3554 - RNA, 21 nt, Sorghum bicolor
uggagaagcaggacacgugag

SEQ ID NO: 3555 - RNA, 20 nt, Sorghum bicolor
ucggaccaggcuucauuccc

SEQ ID NO: 3556 - RNA, 20 nt, Sorghum bicolor
ucggaccaggcuucauuccc

SEQ ID NO: 3557 - RNA, 20 nt, Sorghum bicolor
ucggaccaggcuucauuccc

SEQ ID NO: 3558 - RNA, 20 nt, Sorghum bicolor
ucggaccaggcuucauuccc

SEQ ID NO: 3559 - RNA, 21 nt, Sorghum bicolor
ucggaccaggcuucaaucccu

SEQ ID NO: 3560 - RNA, 21 nt, Sorghum bicolor
ucggaccaggcuucauuccuc

SEQ ID NO: 3561 - RNA, 21 nt, Sorghum bicolor
ucggaccaggcuucaaucccu

SEQ ID NO: 3562 - RNA, 21 nt, Sorghum bicolor
ugaagcugccagcaugaucua

SEQ ID NO: 3563 - RNA, 21 nt, Sorghum bicolor
ugaagcugccagcaugaucua

SEQ ID NO: 3564 - RNA, 21 nt, Sorghum bicolor
ugaagcugccagcaugaucug

SEQ ID NO: 3565 - RNA, 21 nt, Sorghum bicolor
ugaagcugccagcaugaucug

SEQ ID NO: 3566 - RNA, 21 nt, Sorghum bicolor
ugaagcugccagcaugaucug

SEQ ID NO: 3567 - RNA, 21 nt, Sorghum bicolor
ugaagcugccagcaugaucug

SEQ ID NO: 3568 - RNA, 21 nt, Sorghum bicolor
ugaagcugccagcaugaucug

SEQ ID NO: 3569 - RNA, 21 nt, Sorghum bicolor
ucgcuuggugcagaucgggac

SEQ ID NO: 3570 - RNA, 21 nt, Sorghum bicolor
cagccaaggaugacuugccga

SEQ ID NO: 3571 - RNA, 21 nt, Sorghum bicolor
cagccaaggaugacuugccgg

SEQ ID NO: 3572 - RNA, 21 nt, Sorghum bicolor
uagccaaggaugacuugccua

SEQ ID NO: 3573 - RNA, 21 nt, Sorghum bicolor
uagccaaggaugacuugccua

SEQ ID NO: 3574 - RNA, 21 nt, Sorghum bicolor
uagccaaggaugacuugccug

SEQ ID NO: 3575 - RNA, 21 nt, Sorghum bicolor
uagccaaggaugacuugccug

SEQ ID NO: 3576 - RNA, 21 nt, Sorghum bicolor
uagccaaggaugacuugccug

SEQ ID NO: 3577 - RNA, 21 nt, Sorghum bicolor
uagccaaggaugacuugccug

SEQ ID NO: 3578 - RNA, 21 nt, Sorghum bicolor
uagccaagaaugacuugccua

SEQ ID NO: 3579 - RNA, 21 nt, Sorghum bicolor
ugauugagccgugccaauauc

SEQ ID NO: 3580 - RNA, 21 nt, Sorghum bicolor
ugauugagccgugccaauauc

SEQ ID NO: 3581 - RNA, 21 nt, Sorghum bicolor
gaggugagccgagccaauauc

SEQ ID NO: 3582 - RNA, 21 nt, Sorghum bicolor
ugauugagccgugccaauauc

SEQ ID NO: 3583 - RNA, 21 nt, Sorghum bicolor
gugagccgaaccaauaucacu

SEQ ID NO: 3584 - RNA, 21 nt, Sorghum bicolor
augagccgaaccaauaucacu

SEQ ID NO: 3585 - RNA, 20 nt, Sorghum bicolor
agaaucuugaugaugcugca

SEQ ID NO: 3586 - RNA, 20 nt, Sorghum bicolor
ggaaucuugaugaugcugca

SEQ ID NO: 3587 - RNA, 20 nt, Sorghum bicolor
agaaucuugaugaugcugca

SEQ ID NO: 3588 - RNA, 20 nt, Sorghum bicolor
agaaucuugaugaugcugca

SEQ ID NO: 3589 - RNA, 21 nt, Sorghum bicolor
ugaaucuugaugaugcugcac

SEQ ID NO: 3590 - RNA, 20 nt, Sorghum bicolor
uuggacugaagggugcuccc

SEQ ID NO: 3591 - RNA, 21 nt, Sorghum bicolor
uccaaagggaucgcauugauc

SEQ ID NO: 3592 - RNA, 20 nt, Sorghum bicolor
uuggcauucuguccaccucc

SEQ ID NO: 3593 - RNA, 20 nt, Sorghum bicolor
uuggcauucuguccaccucc

SEQ ID NO: 3594 - RNA, 21 nt, Sorghum bicolor
gugaaguguuugggggaacuc

SEQ ID NO: 3595 - RNA, 21 nt, Sorghum bicolor
gugaaguguuugggggaacuc

SEQ ID NO: 3596 - RNA, 21 nt, Sorghum bicolor
gugaaguguuugggggaacuc

SEQ ID NO: 3597 - RNA, 21 nt, Sorghum bicolor
gugaaguguuugggggaacuc

SEQ ID NO: 3598 - RNA, 21 nt, Sorghum bicolor
gugaaguguuugggggaacuc

SEQ ID NO: 3599 - RNA, 21 nt, Sorghum bicolor
augaaguguuugggggaacuc

SEQ ID NO: 3600 - RNA, 21 nt, Sorghum bicolor
uuccacagcuuucuugaacug

SEQ ID NO: 3601 - RNA, 21 nt, Sorghum bicolor
uuccacagcuuucuugaacug

SEQ ID NO: 3602 - RNA, 21 nt, Sorghum bicolor
uuccacagcuuucuugaacuu

SEQ ID NO: 3603 - RNA, 21 nt, Sorghum bicolor
ugccaaaggagaauugcccug

SEQ ID NO: 3604 - RNA, 21 nt, Sorghum bicolor
ugccaaaggagagcugcccug

SEQ ID NO: 3605 - RNA, 21 nt, Sorghum bicolor
ugccaaaggagaauugcccug

SEQ ID NO: 3606 - RNA, 21 nt, Sorghum bicolor
ugccaaaggagaguugcccug

SEQ ID NO: 3607 - RNA, 21 nt, Sorghum bicolor
ugccaaaggagauuugcccag

SEQ ID NO: 3608 - RNA, 21 nt, Sorghum bicolor
ugccaaaggagauuugcccag

SEQ ID NO: 3609 - RNA, 21 nt, Sorghum bicolor
ugccaaaggaaauuugccccg

SEQ ID NO: 3610 - RNA, 21 nt, Sorghum bicolor
ugccaaaggagaauugcccug

SEQ ID NO: 3611 - RNA, 21 nt, Sorghum bicolor
ugccaaaggagaguugcccug

SEQ ID NO: 3612 - RNA, 22 nt, Saguinus labiatus
aacccguagauccgaacuugug

SEQ ID NO: 3613 - RNA, 22 nt, Saguinus labiatus
uacaguacugugauaacugaag

SEQ ID NO: 3614 - RNA, 20 nt, Saguinus labiatus
ucaaaugcucagacuccugu

SEQ ID NO: 3615 - RNA, 24 nt, Saguinus labiatus
aaaagugcuuacagugcagguagc

SEQ ID NO: 3616 - RNA, 21 nt, Saguinus labiatus
uaaagugcugacagugcagau

SEQ ID NO: 3617 - RNA, 23 nt, Saguinus labiatus
uacccuguagauccgaauuugug

SEQ ID NO: 3618 - RNA, 22 nt, Saguinus labiatus
ucccugagacccuaacuuguga

SEQ ID NO: 3619 - RNA, 22 nt, Saguinus labiatus
ucggauccgucugagcuuggcu

SEQ ID NO: 3620 - RNA, 22 nt, Saguinus labiatus
ucacagugaaccggucucuuuu

SEQ ID NO: 3621 - RNA, 22 nt, Saguinus labiatus
uugguccccuucaaccagcugu

SEQ ID NO: 3622 - RNA, 20 nt, Saguinus labiatus
guguguggaaaugcuucugc

SEQ ID NO: 3623 - RNA, 22 nt, Saguinus labiatus
uagcagcacauaaugguuugug

SEQ ID NO: 3624 - RNA, 22 nt, Saguinus labiatus
uagcagcacguaaauauuggcg

SEQ ID NO: 3625 - RNA, 20 nt, Saguinus labiatus
acugcagugaaggcacuugu

SEQ ID NO: 3626 - RNA, 24 nt, Saguinus labiatus
caaagugcuuacagugcagguagu

SEQ ID NO: 3627 - RNA, 22 nt, Saguinus labiatus
uaaggugcaucuagugcagaua

SEQ ID NO: 3628 - RNA, 23 nt, Saguinus labiatus
aacauucaacgcugucggugagu

SEQ ID NO: 3629 - RNA, 23 nt, Saguinus labiatus
uauggcacugguagaauucacug

SEQ ID NO: 3630 - RNA, 19 nt, Saguinus labiatus
gguccagaggggagcucga

SEQ ID NO: 3631 - RNA, 23 nt, Saguinus labiatus
cccaguguucagacuaccuguuc

SEQ ID NO: 3632 - RNA, 23 nt, Saguinus labiatus
ugugcaaaucuaugcaaaacuga

SEQ ID NO: 3633 - RNA, 23 nt, Saguinus labiatus
ugugcaaauccaugcaaaacuga

SEQ ID NO: 3634 - RNA, 22 nt, Saguinus labiatus
uaaagugcuuauagugcaggua

SEQ ID NO: 3635 - RNA, 22 nt, Saguinus labiatus
uucccuuugucauccuaugccu

SEQ ID NO: 3636 - RNA, 21 nt, Saguinus labiatus
acagcaggcacagacaggcag

SEQ ID NO: 3637 - RNA, 21 nt, Saguinus labiatus
uugugcuugaucuaaccaugu

SEQ ID NO: 3638 - RNA, 22 nt, Saguinus labiatus
aagcugccaguugaagaacugu

SEQ ID NO: 3639 - RNA, 21 nt, Saguinus labiatus
ugucaguuugucaaauacccc

SEQ ID NO: 3640 - RNA, 21 nt, Saguinus labiatus
aucacauugccagggauuucc

SEQ ID NO: 3641 - RNA, 22 nt, Saguinus labiatus
uucacaguggcuaaguuccgcc

SEQ ID NO: 3642 - RNA, 22 nt, Saguinus labiatus
aaggagcucacagucuauugag

SEQ ID NO: 3643 - RNA, 22 nt, Saguinus labiatus
cuagcaccaucugaaaucgguu

SEQ ID NO: 3644 - RNA, 20 nt, Saguinus labiatus
uagcaccauuugaaaucagu

SEQ ID NO: 3645 - RNA, 21 nt, Saguinus labiatus
uauugcacauuacuaaguugc

SEQ ID NO: 3646 - RNA, 22 nt, Saguinus labiatus
uggcagugucuuagcugguugu

SEQ ID NO: 3647 - RNA, 21 nt, Saguinus labiatus
uggaagacuagugauuuuguu

SEQ ID NO: 3648 - RNA, 22 nt, Saguinus labiatus
uauugcacuugucccggccugu

SEQ ID NO: 3649 - RNA, 22 nt, Saguinus labiatus
aaagugcuguucgugcagguag

SEQ ID NO: 3650 - RNA, 22 nt, Saguinus labiatus
uucaacggguauuuauugagca

SEQ ID NO: 3651 - RNA, 22 nt, Saguinus labiatus
uuuggcacuagcacauuuuugc

SEQ ID NO: 3652 - RNA, 21 nt, Schmidtea mediterranea
ugagaucacuaugaaagcugg

SEQ ID NO: 3653 - RNA, 22 nt, Schmidtea mediterranea
ugagaucacugcgaaagcugau

SEQ ID NO: 3654 - RNA, 22 nt, Schmidtea mediterranea
ugagaucauuaugaaagcuuuu

SEQ ID NO: 3655 - RNA, 22 nt, Schmidtea mediterranea
ugagguagaauguuggaugacu

SEQ ID NO: 3656 - RNA, 22 nt, Schmidtea mediterranea
ugagguagauuguuggaugacu

SEQ ID NO: 3657 - RNA, 22 nt, Schmidtea mediterranea
ccauucaacuaucugucuucuc

SEQ ID NO: 3658 - RNA, 22 nt, Schmidtea mediterranea
ugagguagugacucaaaagguu

SEQ ID NO: 3659 - RNA, 22 nt, Schmidtea mediterranea
ucccugagaccuucgacugugu

SEQ ID NO: 3660 - RNA, 22 nt, Schmidtea mediterranea
aacccuguagauccgaguuuga

SEQ ID NO: 3661 - RNA, 18 nt, Schmidtea mediterranea
ucgaaucuucaaggugaa

SEQ ID NO: 3662 - RNA, 22 nt, Schmidtea mediterranea
ugaguauucuaucaggagucga

SEQ ID NO: 3663 - RNA, 21 nt, Schmidtea mediterranea
uaaggcacgcggugaaugcuu

SEQ ID NO: 3664 - RNA, 22 nt, Schmidtea mediterranea
uaaggcacgcggugaaugcuga

SEQ ID NO: 3665 - RNA, 21 nt, Schmidtea mediterranea
uaaggcacgcggugaaugcca

SEQ ID NO: 3666 - RNA, 22 nt, Schmidtea mediterranea
gcgcucaccucgugaccuuugu

SEQ ID NO: 3667 - RNA, 22 nt, Schmidtea mediterranea
ucccugagaccauugacugcau

SEQ ID NO: 3668 - RNA, 20 nt, Schmidtea mediterranea
guaguuuuugguaucaggau

SEQ ID NO: 3669 - RNA, 22 nt, Schmidtea mediterranea
ucccugagaucauaauaugccu

SEQ ID NO: 3670 - RNA, 22 nt, Schmidtea mediterranea
uaucacagucaugcuaaagagc

SEQ ID NO: 3671 - RNA, 20 nt, Schmidtea mediterranea
uugguccccaucaaccagca

SEQ ID NO: 3672 - RNA, 20 nt, Schmidtea mediterranea
gacggagguuugcuaaggaa

SEQ ID NO: 3673 - RNA, 23 nt, Schmidtea mediterranea
agauauguuugguuaauugguga

SEQ ID NO: 3674 - RNA, 21 nt, Schmidtea mediterranea
accacugaccgagcauaucca

SEQ ID NO: 3675 - RNA, 23 nt, Schmidtea mediterranea
ugauauguuugguuuauugguga

SEQ ID NO: 3676 - RNA, 23 nt, Schmidtea mediterranea
accauuagccuaauguaucgugu

SEQ ID NO: 3677 - RNA, 22 nt, Schmidtea mediterranea
uggaaugucgagaaauaugcau

SEQ ID NO: 3678 - RNA, 22 nt, Schmidtea mediterranea
uggaaugucgugaauuaugguc

SEQ ID NO: 3679 - RNA, 21 nt, Schmidtea mediterranea
uggaauguugugaauaguguc

SEQ ID NO: 3680 - RNA, 23 nt, Schmidtea mediterranea
ugauuguccauacgcaguucuca

SEQ ID NO: 3681 - RNA, 22 nt, Schmidtea mediterranea
uaaaugcacuaucggauaugac

SEQ ID NO: 3682 - RNA, 22 nt, Schmidtea mediterranea
aaaaugcauuaucuggccaaga

SEQ ID NO: 3683 - RNA, 20 nt, Schmidtea mediterranea
uugaucagaaaugcagcuuc

SEQ ID NO: 3684 - RNA, 22 nt, Schmidtea mediterranea
uaaaugcauuaucugguaugau

SEQ ID NO: 3685 - RNA, 22 nt, Schmidtea mediterranea
uaaaugcauuuaucuggccaag

SEQ ID NO: 3686 - RNA, 20 nt, Schmidtea mediterranea
ucggugggaguaacauucga

SEQ ID NO: 3687 - RNA, 19 nt, Schmidtea mediterranea
ugucauggauaugcucuuc

SEQ ID NO: 3688 - RNA, 20 nt, Schmidtea mediterranea
ugaagagcuauucaugaggu

SEQ ID NO: 3689 - RNA, 24 nt, Schmidtea mediterranea
uaucacagccccgcuuggaacgcu

SEQ ID NO: 3690 - RNA, 20 nt, Schmidtea mediterranea
guucuacgguguugugauau

SEQ ID NO: 3691 - RNA, 22 nt, Schmidtea mediterranea
ucacagccaauuuugaugagau

SEQ ID NO: 3692 - RNA, 20 nt, Schmidtea mediterranea
ucaucauuguugguugucag

SEQ ID NO: 3693 - RNA, 22 nt, Schmidtea mediterranea
ucacagccaaaacugaugaucu

SEQ ID NO: 3694 - RNA, 21 nt, Schmidtea mediterranea
ucacagccaaauuugaugucc

SEQ ID NO: 3695 - RNA, 23 nt, Schmidtea mediterranea
aggcaagauguuggcauaacuga

SEQ ID NO: 3696 - RNA, 23 nt, Schmidtea mediterranea
aggcaagaugcuggcauagcuga

SEQ ID NO: 3697 - RNA, 21 nt, Schmidtea mediterranea
ucaccggguagacauucauua

SEQ ID NO: 3698 - RNA, 20 nt, Schmidtea mediterranea
ugaugcaugcuacuugguuu

SEQ ID NO: 3699 - RNA, 23 nt, Schmidtea mediterranea
ugacuagaaaguucacuuacugu

SEQ ID NO: 3700 - RNA, 23 nt, Schmidtea mediterranea
ucacaaccuccaugaacgagggu

SEQ ID NO: 3701 - RNA, 22 nt, Schmidtea mediterranea
ugaaagacacggguagugagau

SEQ ID NO: 3702 - RNA, 22 nt, Schmidtea mediterranea
ugaaagacacagguagugggac

SEQ ID NO: 3703 - RNA, 20 nt, Schmidtea mediterranea
uccuucuaauguguuuuucg

SEQ ID NO: 3704 - RNA, 22 nt, Schmidtea mediterranea
ugaaagacauggguagugagau

SEQ ID NO: 3705 - RNA, 23 nt, Schmidtea mediterranea
ugcugccugguuaagagcugugu

SEQ ID NO: 3706 - RNA, 22 nt, Schmidtea mediterranea
uagcaccaggguauaucgggau

SEQ ID NO: 3707 - RNA, 23 nt, Schmidtea mediterranea
uaaucucaucugguaauugaagu

SEQ ID NO: 3708 - RNA, 19 nt, Schmidtea mediterranea
uggacggaaguguaaugag

SEQ ID NO: 3709 - RNA, 21 nt, Schmidtea mediterranea
gcugggaugagccucgguggu

SEQ ID NO: 3710 - RNA, 23 nt, Schmidtea mediterranea
ucagaucuaacucuuccaguucu

SEQ ID NO: 3711 - RNA, 21 nt, Schmidtea mediterranea
cauguuugaauggccaugaca

SEQ ID NO: 3712 - RNA, 18 nt, Schmidtea mediterranea
agucagcauuggugguuu

SEQ ID NO: 3713 - RNA, 20 nt, Schmidtea mediterranea
gagcuuggauugugaucuca

SEQ ID NO: 3714 - RNA, 20 nt, Schmidtea mediterranea
guugcuugggguuauuacua

SEQ ID NO: 3715 - RNA, 20 nt, Schmidtea mediterranea
uggagcuauuguauuucacc

SEQ ID NO: 3716 - RNA, 22 nt, Schmidtea mediterranea
cgauaugugguaauuuggauga

SEQ ID NO: 3717 - RNA, 23 nt, Schmidtea mediterranea
guaaagcuaaauuaccaaagugc

SEQ ID NO: 3718 - RNA, 23 nt, Schmidtea mediterranea
uggaagacuauugauuuaguuga

SEQ ID NO: 3719 - RNA, 23 nt, Schmidtea mediterranea
uggaagacugucgauuucguugu

SEQ ID NO: 3720 - RNA, 22 nt, Schmidtea mediterranea
uggaagacugaugauuugcuga

SEQ ID NO: 3721 - RNA, 23 nt, Schmidtea mediterranea
uaauacugucagguaacgaugcc

SEQ ID NO: 3722 - RNA, 20 nt, Schmidtea mediterranea
ugagcaaaguuucaagugua

SEQ ID NO: 3723 - RNA, 21 nt, Schmidtea mediterranea
gugagcaaagcuucaaaugag

SEQ ID NO: 3724 - RNA, 20 nt, Schmidtea mediterranea
gauugcacuaguuaauuauc

SEQ ID NO: 3725 - RNA, 20 nt, Saccharum officinarum
ugacagaagagagugagcac

SEQ ID NO: 3726 - RNA, 21 nt, Saccharum officinarum
uuuggauugaagggagcucug

SEQ ID NO: 3727 - RNA, 21 nt, Saccharum officinarum
uuuggauugaagggagcucug

SEQ ID NO: 3728 - RNA, 21 nt, Saccharum officinarum
cuuggauugaagggagcuccu

SEQ ID NO: 3729 - RNA, 21 nt, Saccharum officinarum
uuuggauugaagggagcucug

SEQ ID NO: 3730 - RNA, 21 nt, Saccharum officinarum
uuuggauugaaaggagcucuu

SEQ ID NO: 3731 - RNA, 21 nt, Saccharum officinarum
ugaagcugccagcaugaucug

SEQ ID NO: 3732 - RNA, 21 nt, Saccharum officinarum
ugaagcugccagcaugaucug

SEQ ID NO: 3733 - RNA, 21 nt, Saccharum officinarum
ucgcuuggugcagaucgggac

SEQ ID NO: 3734 - RNA, 20 nt, Saccharum officinarum
ucgcuugggcagaucgggac

SEQ ID NO: 3735 - RNA, 21 nt, Saccharum officinarum
uuccacagcuuucuugaacug

SEQ ID NO: 3736 - RNA, 21 nt, Saccharum officinarum
cugcacugccucuucccuggc

SEQ ID NO: 3737 - RNA, 21 nt, Saccharum officinarum
cugcacugccucuucccuggc

SEQ ID NO: 3738 - RNA, 21 nt, Saccharum officinarum
cugcacugccucuucccuggc

SEQ ID NO: 3739 - RNA, 21 nt, Saccharum officinarum
cugcacugccucuucccuggc

SEQ ID NO: 3740 - RNA, 21 nt, Saccharum officinarum
cugcacugacucuucccuggc

SEQ ID NO: 3741 - RNA, 22 nt, Sus scrofa
ugagguaguagguuguaugguu

SEQ ID NO: 3742 - RNA, 22 nt, Sus scrofa
ugagguaguagauuguauaguu

SEQ ID NO: 3743 - RNA, 19 nt, Sus scrofa
ugagguaguaguuugugcu

SEQ ID NO: 3744 - RNA, 23 nt, Sus scrofa
agcagcauuguacagggcuauga

SEQ ID NO: 3745 - RNA, 20 nt, Sus scrofa
ucaaaugcucagacuccugu

SEQ ID NO: 3746 - RNA, 20 nt, Sus scrofa
ucaaaugcucagacuccuug

SEQ ID NO: 3747 - RNA, 24 nt, Sus scrofa
aaaagugcuuacagugcagguagc

SEQ ID NO: 3748 - RNA, 23 nt, Sus scrofa
agcagcauuguacagggcuauca

SEQ ID NO: 3749 - RNA, 23 nt, Sus scrofa
uggagugugacaaugguguuugu

SEQ ID NO: 3750 - RNA, 22 nt, Sus scrofa
uuaaggcacgcggugaaugcca

SEQ ID NO: 3751 - RNA, 22 nt, Sus scrofa
ucccugagacccuaacuuguga

SEQ ID NO: 3752 - RNA, 22 nt, Sus scrofa
ucacagugaaccggucucuuuu

SEQ ID NO: 3753 - RNA, 23 nt, Sus scrofa
uauggcuuuuuauuccuauguga

SEQ ID NO: 3754 - RNA, 23 nt, Sus scrofa
acuccauuuguuuugaugaugga

SEQ ID NO: 3755 - RNA, 18 nt, Sus scrofa
ucuacagugcacgugucu

SEQ ID NO: 3756 - RNA, 21 nt, Sus scrofa
agugguuuuacccuaugguag

SEQ ID NO: 3757 - RNA, 24 nt, Sus scrofa
guccaguuuucccaggaaucccuu

SEQ ID NO: 3758 - RNA, 22 nt, Sus scrofa
ucagugcacuacagaacuuugu

SEQ ID NO: 3759 - RNA, 20 nt, Sus scrofa
uugcauagucacaaaaguga

SEQ ID NO: 3760 - RNA, 22 nt, Sus scrofa
ccgcagcacaucaugguuuaca

SEQ ID NO: 3761 - RNA, 22 nt, Sus scrofa
uaaggugcaucuagugcagaua

SEQ ID NO: 3762 - RNA, 24 nt, Sus scrofa
aacauucauugcugucgguggguu

SEQ ID NO: 3763 - RNA, 22 nt, Sus scrofa
aacauucaaccugucggugagu

SEQ ID NO: 3764 - RNA, 23 nt, Sus scrofa
uauggcacugguagaauucacug

SEQ ID NO: 3765 - RNA, 22 nt, Sus scrofa
uggacggagaacugauaagggu

SEQ ID NO: 3766 - RNA, 23 nt, Sus scrofa
caaagaauucuccuuuugggcuu

SEQ ID NO: 3767 - RNA, 21 nt, Sus scrofa
uagguaguuucauguuguugg

SEQ ID NO: 3768 - RNA, 23 nt, Sus scrofa
ugugcaaaucuaugcaaaacuga

SEQ ID NO: 3769 - RNA, 22 nt, Sus scrofa
uaaagugcuuauagugcaggua

SEQ ID NO: 3770 - RNA, 22 nt, Sus scrofa
uucccuuugucauccuaugccu

SEQ ID NO: 3771 - RNA, 22 nt, Sus scrofa
uccuucauuccaccggagucug

SEQ ID NO: 3772 - RNA, 22 nt, Sus scrofa
uagcuuaucagacugauguuga

SEQ ID NO: 3773 - RNA, 21 nt, Sus scrofa
acagcaggcacagacaggcag

SEQ ID NO: 3774 - RNA, 21 nt, Sus scrofa
uaaucucagcuggcaacugug

SEQ ID NO: 3775 - RNA, 24 nt, Sus scrofa
uacugcaucaggaacugauuggau

SEQ ID NO: 3776 - RNA, 23 nt, Sus scrofa
caagucacuagugguuccguuua

SEQ ID NO: 3777 - RNA, 21 nt, Sus scrofa
aucacauugccagggauuucc

SEQ ID NO: 3778 - RNA, 22 nt, Sus scrofa
uggcucaguucagcaggaacag

SEQ ID NO: 3779 - RNA, 22 nt, Sus scrofa
uucaaguaauccaggauaggcu

SEQ ID NO: 3780 - RNA, 21 nt, Sus scrofa
uucacaguggcuaaguuccgc

SEQ ID NO: 3781 - RNA, 22 nt, Sus scrofa
aaggagcucacacucuauugag

SEQ ID NO: 3782 - RNA, 20 nt, Sus scrofa
uagcaccauuugaaaucagu

SEQ ID NO: 3783 - RNA, 22 nt, Sus scrofa
uagcaccauuugaaaucgguua

SEQ ID NO: 3784 - RNA, 23 nt, Sus scrofa
caguccaauaguauugucaaagc

SEQ ID NO: 3785 - RNA, 23 nt, Sus scrofa
uguaaacauccuacacucucagc

SEQ ID NO: 3786 - RNA, 21 nt, Sus scrofa
uauugcacauuacuaaguugc

SEQ ID NO: 3787 - RNA, 22 nt, Sus scrofa
gcacauuacacggucgaccucu

SEQ ID NO: 3788 - RNA, 23 nt, Sus scrofa
ccuaguagguguucaguaagugu

SEQ ID NO: 3789 - RNA, 20 nt, Sus scrofa
ccucugggcccuuccuccag

SEQ ID NO: 3790 - RNA, 21 nt, Sus scrofa
uggaagacuagugauuuuguu

SEQ ID NO: 3791 - RNA, 23 nt, Sus scrofa
ucuuugguuaucuagcuguauga

SEQ ID NO: 3792 - RNA, 23 nt, Sus scrofa
ucuuugguuaucuagcuguauga

SEQ ID NO: 3793 - RNA, 22 nt, Sus scrofa
uucaacggguauuuauugagca

SEQ ID NO: 3794 - RNA, 20 nt, Simian virus 40
gccuguuucaugcccugagu

SEQ ID NO: 3795 - RNA, 22 nt, Simian virus 40
ugaggggccugaaaugagccuu

SEQ ID NO: 3796 - RNA, 22 nt, Tetraodon nigroviridis
ugagguaguagguuguauaguu

SEQ ID NO: 3797 - RNA, 22 nt, Tetraodon nigroviridis
ugagguaguagguugugugguu

SEQ ID NO: 3798 - RNA, 22 nt, Tetraodon nigroviridis
ugagguaguugguuguaugguu

SEQ ID NO: 3799 - RNA, 22 nt, Tetraodon nigroviridis
ugagguaguagauugaauaguu

SEQ ID NO: 3800 - RNA, 22 nt, Tetraodon nigroviridis
ugagguaguaguuuguauaguu

SEQ ID NO: 3801 - RNA, 22 nt, Tetraodon nigroviridis
ugagguaguaaguuguguuguu

SEQ ID NO: 3802 - RNA, 22 nt, Tetraodon nigroviridis
ugagguaguaguuugugcuguu

SEQ ID NO: 3803 - RNA, 22 nt, Tetraodon nigroviridis
ugagguaguuuuuuguacaguu

SEQ ID NO: 3804 - RNA, 22 nt, Tetraodon nigroviridis
uggaauguaaagaaguauguau

SEQ ID NO: 3805 - RNA, 22 nt, Tetraodon nigroviridis
aacccguagauccgaacuugug

SEQ ID NO: 3806 - RNA, 22 nt, Tetraodon nigroviridis
uacaguacugugauaacugaag

SEQ ID NO: 3807 - RNA, 22 nt, Tetraodon nigroviridis
uacaguacuaugauaacugaag

SEQ ID NO: 3808 - RNA, 23 nt, Tetraodon nigroviridis
agcagcauuguacagggcuauga

SEQ ID NO: 3809 - RNA, 23 nt, Tetraodon nigroviridis
agcagcauuguacagggcuauca

SEQ ID NO: 3810 - RNA, 23 nt, Tetraodon nigroviridis
uacccuguagaaccgaauuugug

SEQ ID NO: 3811 - RNA, 22 nt, Tetraodon nigroviridis
uacccuguagauccggauuugu

SEQ ID NO: 3812 - RNA, 25 nt, Tetraodon nigroviridis
uacccuguagaaccgaaugugugug

SEQ ID NO: 3813 - RNA, 22 nt, Tetraodon nigroviridis
uggagugugacaaugguguuug

SEQ ID NO: 3814 - RNA, 22 nt, Tetraodon nigroviridis
uaaggcacgcggugaaugccaa

SEQ ID NO: 3815 - RNA, 22 nt, Tetraodon nigroviridis
ucccugagacccuuaaccugug

SEQ ID NO: 3816 - RNA, 22 nt, Tetraodon nigroviridis
ucccugagacccuaacuuguga

SEQ ID NO: 3817 - RNA, 21 nt, Tetraodon nigroviridis
ucguaccgugaguaauaaugc

SEQ ID NO: 3818 - RNA, 22 nt, Tetraodon nigroviridis
ucacagugaaccggucucuuuu

SEQ ID NO: 3819 - RNA, 22 nt, Tetraodon nigroviridis
cuuuuugcggucugggcuugcu

SEQ ID NO: 3820 - RNA, 22 nt, Tetraodon nigroviridis
cagugcaauauuaaaagggcau

SEQ ID NO: 3821 - RNA, 22 nt, Tetraodon nigroviridis
uaacagucuacagccauggucg

SEQ ID NO: 3822 - RNA, 22 nt, Tetraodon nigroviridis
uuugguccccuucaaccagcug

SEQ ID NO: 3823 - RNA, 22 nt, Tetraodon nigroviridis
uauggcuuucuauuccuaugug

SEQ ID NO: 3824 - RNA, 22 nt, Tetraodon nigroviridis
uauggcuuuuuauuccuaucug

SEQ ID NO: 3825 - RNA, 22 nt, Tetraodon nigroviridis
uuauugcuugagaauacgcgua

SEQ ID NO: 3826 - RNA, 22 nt, Tetraodon nigroviridis
agcugguguugugaaucaggcc

SEQ ID NO: 3827 - RNA, 22 nt, Tetraodon nigroviridis
cagugguuuuacccuaugguag

SEQ ID NO: 3828 - RNA, 21 nt, Tetraodon nigroviridis
cauaaaguagaaagcacuacu

SEQ ID NO: 3829 - RNA, 22 nt, Tetraodon nigroviridis
cauaaaguagaaagcacuacua

SEQ ID NO: 3830 - RNA, 20 nt, Tetraodon nigroviridis
uacaguauagaugauguacu

SEQ ID NO: 3831 - RNA, 22 nt, Tetraodon nigroviridis
ucagugcauuacagaacuuugu

SEQ ID NO: 3832 - RNA, 22 nt, Tetraodon nigroviridis
ucagugcauaacagaacuuugu

SEQ ID NO: 3833 - RNA, 22 nt, Tetraodon nigroviridis
uugcauagucacaaaagugauc

SEQ ID NO: 3834 - RNA, 22 nt, Tetraodon nigroviridis
uugcauagucacaaaaaugagc

SEQ ID NO: 3835 - RNA, 22 nt, Tetraodon nigroviridis
uagcagcacggaaugguuugug

SEQ ID NO: 3836 - RNA, 22 nt, Tetraodon nigroviridis
uagcagcgcaucaugguuugua

SEQ ID NO: 3837 - RNA, 22 nt, Tetraodon nigroviridis
uagcagcacguaaauauuggag

SEQ ID NO: 3838 - RNA, 22 nt, Tetraodon nigroviridis
caaagugcuuacagugcaggua

SEQ ID NO: 3839 - RNA, 22 nt, Tetraodon nigroviridis
uaaggugcaucuagugcagaua

SEQ ID NO: 3840 - RNA, 23 nt, Tetraodon nigroviridis
aacauucaacgcugucggugagu

SEQ ID NO: 3841 - RNA, 22 nt, Tetraodon nigroviridis
accaucgaccguugauuguacc

SEQ ID NO: 3842 - RNA, 22 nt, Tetraodon nigroviridis
aacauucauugcugucgguggg

SEQ ID NO: 3843 - RNA, 21 nt, Tetraodon nigroviridis
ugguucuagacuugccaacua

SEQ ID NO: 3844 - RNA, 23 nt, Tetraodon nigroviridis
uauggcacugguagaauucacug

SEQ ID NO: 3845 - RNA, 21 nt, Tetraodon nigroviridis
uggacggagaacugauaaggg

SEQ ID NO: 3846 - RNA, 20 nt, Tetraodon nigroviridis
ucgugucuuguguugcagcc

SEQ ID NO: 3847 - RNA, 22 nt, Tetraodon nigroviridis
ugauauguuugauauauuaggu

SEQ ID NO: 3848 - RNA, 21 nt, Tetraodon nigroviridis
augaccuaugaauugacagcc

SEQ ID NO: 3849 - RNA, 22 nt, Tetraodon nigroviridis
aacuggccuacaaagucccagu

SEQ ID NO: 3850 - RNA, 21 nt, Tetraodon nigroviridis
uguaacagcaacuccaugugg

SEQ ID NO: 3851 - RNA, 22 nt, Tetraodon nigroviridis
uagguaguuucauguuguuggg

SEQ ID NO: 3852 - RNA, 22 nt, Tetraodon nigroviridis
uagguaguuucaaguuguuggg

SEQ ID NO: 3853 - RNA, 23 nt, Tetraodon nigroviridis
cccaguguucagacuaccuguuc

SEQ ID NO: 3854 - RNA, 23 nt, Tetraodon nigroviridis
ugugcaaaucuaugcaaaacuga

SEQ ID NO: 3855 - RNA, 23 nt, Tetraodon nigroviridis
ugugcaaauccaugcaaaacuga

SEQ ID NO: 3856 - RNA, 23 nt, Tetraodon nigroviridis
uaaagugcuuauagugcagguag

SEQ ID NO: 3857 - RNA, 22 nt, Tetraodon nigroviridis
uaacacugucugguaacgaugu

SEQ ID NO: 3858 - RNA, 22 nt, Tetraodon nigroviridis
uaauacugccugguaaugauga

SEQ ID NO: 3859 - RNA, 22 nt, Tetraodon nigroviridis
agaggcauagggcaugggaaaa

SEQ ID NO: 3860 - RNA, 22 nt, Tetraodon nigroviridis
gugaaauguuuaggaccacuug

SEQ ID NO: 3861 - RNA, 22 nt, Tetraodon nigroviridis
uucccuuugucauccuaugccu

SEQ ID NO: 3862 - RNA, 22 nt, Tetraodon nigroviridis
uucccuuuguuauccuaugccu

SEQ ID NO: 3863 - RNA, 22 nt, Tetraodon nigroviridis
uccuucauuccaccggagucug

SEQ ID NO: 3864 - RNA, 23 nt, Tetraodon nigroviridis
uagcuuaucagacugguguuggc

SEQ ID NO: 3865 - RNA, 22 nt, Tetraodon nigroviridis
cugugcgugugacagcggcuaa

SEQ ID NO: 3866 - RNA, 21 nt, Tetraodon nigroviridis
uaacagucuacagucauggcu

SEQ ID NO: 3867 - RNA, 21 nt, Tetraodon nigroviridis
acagcaggcacagacaggcag

SEQ ID NO: 3868 - RNA, 22 nt, Tetraodon nigroviridis
aaaucucagcuggcaacuguga

SEQ ID NO: 3869 - RNA, 22 nt, Tetraodon nigroviridis
uaaucucugcaggcaacuguga

SEQ ID NO: 3870 - RNA, 22 nt, Tetraodon nigroviridis
uacugcaucaggaacugauugg

SEQ ID NO: 3871 - RNA, 22 nt, Tetraodon nigroviridis
uugugcuugaucuaaccaugug

SEQ ID NO: 3872 - RNA, 22 nt, Tetraodon nigroviridis
uugugcuugaucuaaccaugca

SEQ ID NO: 3873 - RNA, 22 nt, Tetraodon nigroviridis
ugauuguccaaacgcaauucuu

SEQ ID NO: 3874 - RNA, 23 nt, Tetraodon nigroviridis
agcuacauugucugcuggguuuc

SEQ ID NO: 3875 - RNA, 24 nt, Tetraodon nigroviridis
agcuacaucuggcuacugggucuc

SEQ ID NO: 3876 - RNA, 21 nt, Tetraodon nigroviridis
ugucaguuugucaaauacccc

SEQ ID NO: 3877 - RNA, 22 nt, Tetraodon nigroviridis
aagcugccagcugaagaacugu

SEQ ID NO: 3878 - RNA, 22 nt, Tetraodon nigroviridis
aagcugccaguugaagagcugu

SEQ ID NO: 3879 - RNA, 22 nt, Tetraodon nigroviridis
aucacauugccagggauuucca

SEQ ID NO: 3880 - RNA, 22 nt, Tetraodon nigroviridis
aucacauugccagggauuacca

SEQ ID NO: 3881 - RNA, 22 nt, Tetraodon nigroviridis
uggcucaguucagcaggaacag

SEQ ID NO: 3882 - RNA, 22 nt, Tetraodon nigroviridis
cauugcacuugucucggucuga

SEQ ID NO: 3883 - RNA, 22 nt, Tetraodon nigroviridis
uucaaguaauccaggauaggcu

SEQ ID NO: 3884 - RNA, 22 nt, Tetraodon nigroviridis
uucacaguggcuaaguucugca

SEQ ID NO: 3885 - RNA, 21 nt, Tetraodon nigroviridis
uucacagugguuaaguucugc

SEQ ID NO: 3886 - RNA, 22 nt, Tetraodon nigroviridis
uucacaguggcuaaguucagug

SEQ ID NO: 3887 - RNA, 22 nt, Tetraodon nigroviridis
uagcaccauuugaaaucgguua

SEQ ID NO: 3888 - RNA, 22 nt, Tetraodon nigroviridis
uagcaccauuugaaaucagugu

SEQ ID NO: 3889 - RNA, 22 nt, Tetraodon nigroviridis
cagugcaauaguauugucauag

SEQ ID NO: 3890 - RNA, 22 nt, Tetraodon nigroviridis
uguaaacauccuacacucagcu

SEQ ID NO: 3891 - RNA, 22 nt, Tetraodon nigroviridis
uguaaacauccuacacucucgg

SEQ ID NO: 3892 - RNA, 22 nt, Tetraodon nigroviridis
uguaaacauccccgacuggaag

SEQ ID NO: 3893 - RNA, 22 nt, Tetraodon nigroviridis
uccagcaucagugauuuuguug

SEQ ID NO: 3894 - RNA, 22 nt, Tetraodon nigroviridis
uaaugccccuaaaaauccuuau

SEQ ID NO: 3895 - RNA, 22 nt, Tetraodon nigroviridis
uuuguucguucggcucgcguua

SEQ ID NO: 3896 - RNA, 22 nt, Tetraodon nigroviridis
uaauacugucugguaaugccgu

SEQ ID NO: 3897 - RNA, 22 nt, Tetraodon nigroviridis
uaugugcccuuggacuacaucg

SEQ ID NO: 3898 - RNA, 22 nt, Tetraodon nigroviridis
auagcucuuuaaaugguucugc

SEQ ID NO: 3899 - RNA, 22 nt, Tetraodon nigroviridis
cacagcgcauacaauguggaug

SEQ ID NO: 3900 - RNA, 23 nt, Tetraodon nigroviridis
agugacaucauauguacggcugc

SEQ ID NO: 3901 - RNA, 23 nt, Tetraodon nigroviridis
uggaagacuagugauuuuguugu

SEQ ID NO: 3902 - RNA, 23 nt, Tetraodon nigroviridis
ucuuugguuaucuagcuguauga

SEQ ID NO: 3903 - RNA, 22 nt, Tetraodon nigroviridis
uauugcacuugucccggccugu

SEQ ID NO: 3904 - RNA, 23 nt, Tetraodon nigroviridis
uuuggcacuagcacauuuuugcu

SEQ ID NO: 3905 - RNA, 22 nt, Xenopus laevis
uugguccccuucaaccagcugu

SEQ ID NO: 3906 - RNA, 23 nt, Xenopus laevis
uaaggugcaucuagugcaguuag

SEQ ID NO: 3907 - RNA, 23 nt, Xenopus laevis
ugugcaaauccaugcaaaacuga

SEQ ID NO: 3908 - RNA, 23 nt, Xenopus laevis
caaagugcucauagugcagguag

SEQ ID NO: 3909 - RNA, 22 nt, Xenopus laevis
aaagugcuuucuguuuugggcg

SEQ ID NO: 3910 - RNA, 22 nt, Xenopus laevis
uaagugcucucuaguucgguug

SEQ ID NO: 3911 - RNA, 21 nt, Xenopus laevis
uaauacugucugguaaugccg

SEQ ID NO: 3912 - RNA, 22 nt, Xenopus tropicalis
ugagguaguagguuguauaguu

SEQ ID NO: 3913 - RNA, 22 nt, Xenopus tropicalis
ugagguaguaguuuguguaguu

SEQ ID NO: 3914 - RNA, 22 nt, Xenopus tropicalis
ugagguaguagguuguaugguu

SEQ ID NO: 3915 - RNA, 22 nt, Xenopus tropicalis
ugagguaguagguuguuuaguu

SEQ ID NO: 3916 - RNA, 21 nt, Xenopus tropicalis
ugagguaguagauuguauagu

SEQ ID NO: 3917 - RNA, 21 nt, Xenopus tropicalis
ugagguaguuguuuguacagu

SEQ ID NO: 3918 - RNA, 21 nt, Xenopus tropicalis
ugagguaguaguuugugcugu

SEQ ID NO: 3919 - RNA, 22 nt, Xenopus tropicalis
aacccguagauccgaacuugug

SEQ ID NO: 3920 - RNA, 22 nt, Xenopus tropicalis
uacaguacugugauaacugaag

SEQ ID NO: 3921 - RNA, 23 nt, Xenopus tropicalis
agcagcauuguacagggcuauga

SEQ ID NO: 3922 - RNA, 24 nt, Xenopus tropicalis
aaaagugcuuauagugcagguaga

SEQ ID NO: 3923 - RNA, 23 nt, Xenopus tropicalis
agcagcauuguacagggcuauca

SEQ ID NO: 3924 - RNA, 23 nt, Xenopus tropicalis
uacccuguagauccgaauuugug

SEQ ID NO: 3925 - RNA, 22 nt, Xenopus tropicalis
uacccuguagaaccgaauuugu

SEQ ID NO: 3926 - RNA, 22 nt, Xenopus tropicalis
cacccuguagaaucgaauuugu

SEQ ID NO: 3927 - RNA, 23 nt, Xenopus tropicalis
uggagugugacaaugguguuugu

SEQ ID NO: 3928 - RNA, 22 nt, Xenopus tropicalis
uuaaggcacgcggugaaugcca

SEQ ID NO: 3929 - RNA, 22 nt, Xenopus tropicalis
ucccugagacccuuaaccugug

SEQ ID NO: 3930 - RNA, 22 nt, Xenopus tropicalis
ucccugagacccuaacuuguga

SEQ ID NO: 3931 - RNA, 21 nt, Xenopus tropicalis
ucguaccgugaguaauaaugc

SEQ ID NO: 3932 - RNA, 21 nt, Xenopus tropicalis
cauuauuacuuuugguacgcg

SEQ ID NO: 3933 - RNA, 22 nt, Xenopus tropicalis
ucacagugaaccggucucuuuu

SEQ ID NO: 3934 - RNA, 21 nt, Xenopus tropicalis
cuuuuugcggucugggcuugc

SEQ ID NO: 3935 - RNA, 22 nt, Xenopus tropicalis
cagugcaauguuaaaagggcau

SEQ ID NO: 3936 - RNA, 22 nt, Xenopus tropicalis
cagugcaaugaugaaagggcau

SEQ ID NO: 3937 - RNA, 22 nt, Xenopus tropicalis
cagugcaauauuaaaagggcau

SEQ ID NO: 3938 - RNA, 22 nt, Xenopus tropicalis
uaacagucuacagccauggucg

SEQ ID NO: 3939 - RNA, 22 nt, Xenopus tropicalis
uugguccccuucaaccagcugu

SEQ ID NO: 3940 - RNA, 21 nt, Xenopus tropicalis
uugguccccuucaaccagcua

SEQ ID NO: 3941 - RNA, 22 nt, Xenopus tropicalis
uugguccccuucaaccagcugc

SEQ ID NO: 3942 - RNA, 22 nt, Xenopus tropicalis
uugguccccuucaaccagccgc

SEQ ID NO: 3943 - RNA, 23 nt, Xenopus tropicalis
uauggcuuuuuauuccuauguga

SEQ ID NO: 3944 - RNA, 22 nt, Xenopus tropicalis
uauugcuuaagaauacgcguag

SEQ ID NO: 3945 - RNA, 17 nt, Xenopus tropicalis
agcugguguugugaauc

SEQ ID NO: 3946 - RNA, 18 nt, Xenopus tropicalis
ucuacagugcaugugucu

SEQ ID NO: 3947 - RNA, 21 nt, Xenopus tropicalis
agugguuuuacccuaugguag

SEQ ID NO: 3948 - RNA, 23 nt, Xenopus tropicalis
uguaguguuuccuacuuuaugga

SEQ ID NO: 3949 - RNA, 20 nt, Xenopus tropicalis
cauaaaguagaaagcacuac

SEQ ID NO: 3950 - RNA, 22 nt, Xenopus tropicalis
ugagaugaagcacuguagcucg

SEQ ID NO: 3951 - RNA, 21 nt, Xenopus tropicalis
uacaguauagaugauguacua

SEQ ID NO: 3952 - RNA, 24 nt, Xenopus tropicalis
guccaguuuucccaggaaucccuu

SEQ ID NO: 3953 - RNA, 22 nt, Xenopus tropicalis
ugagaacugaauuccauagguu

SEQ ID NO: 3954 - RNA, 22 nt, Xenopus tropicalis
ucagugcacuacagaacuuugu

SEQ ID NO: 3955 - RNA, 22 nt, Xenopus tropicalis
ucagugcaucacagaacuuugu

SEQ ID NO: 3956 - RNA, 22 nt, Xenopus tropicalis
ucucccaacccuuguaccagag

SEQ ID NO: 3957 - RNA, 20 nt, Xenopus tropicalis
uugcauagucacaaaaguga

SEQ ID NO: 3958 - RNA, 22 nt, Xenopus tropicalis
uuaaugcuaaucgugauagggg

SEQ ID NO: 3959 - RNA, 22 nt, Xenopus tropicalis
uagcagcacauaaugguuugug

SEQ ID NO: 3960 - RNA, 22 nt, Xenopus tropicalis
uagcagcacaucaugauuugca

SEQ ID NO: 3961 - RNA, 22 nt, Xenopus tropicalis
uagcagcacaucaugguuugua

SEQ ID NO: 3962 - RNA, 22 nt, Xenopus tropicalis
uagcagcacguaaauauuggug

SEQ ID NO: 3963 - RNA, 22 nt, Xenopus tropicalis
uagcagcacguaaauauugggu

SEQ ID NO: 3964 - RNA, 22 nt, Xenopus tropicalis
uagcagcacguaaauacuggag

SEQ ID NO: 3965 - RNA, 20 nt, Xenopus tropicalis
acugcagugaaggcacuugu

SEQ ID NO: 3966 - RNA, 24 nt, Xenopus tropicalis
caaagugcuuacagugcagguagu

SEQ ID NO: 3967 - RNA, 23 nt, Xenopus tropicalis
aacauucaacgcugucggugagu

SEQ ID NO: 3968 - RNA, 22 nt, Xenopus tropicalis
accaucgaucguugacuguaca

SEQ ID NO: 3969 - RNA, 22 nt, Xenopus tropicalis
aacauucauugcugucgguggg

SEQ ID NO: 3970 - RNA, 22 nt, Xenopus tropicalis
uuuggcaaugguagaacucaca

SEQ ID NO: 3971 - RNA, 21 nt, Xenopus tropicalis
ugguucuagacuugccaacua

SEQ ID NO: 3972 - RNA, 23 nt, Xenopus tropicalis
uauggcacugguagaauucacug

SEQ ID NO: 3973 - RNA, 22 nt, Xenopus tropicalis
uggacggagaacugauaaggcu

SEQ ID NO: 3974 - RNA, 21 nt, Xenopus tropicalis
ucgugucuuguguugcagcca

SEQ ID NO: 3975 - RNA, 23 nt, Xenopus tropicalis
gugccuacugaacugauaucagu

SEQ ID NO: 3976 - RNA, 22 nt, Xenopus tropicalis
uaaggugcaucuagugcagaua

SEQ ID NO: 3977 - RNA, 23 nt, Xenopus tropicalis
uaaggugcaucuagugcaguuag

SEQ ID NO: 3978 - RNA, 22 nt, Xenopus tropicalis
caacggaaucccaaaagcagcu

SEQ ID NO: 3979 - RNA, 21 nt, Xenopus tropicalis
augaccuaugaauugacagcc

SEQ ID NO: 3980 - RNA, 24 nt, Xenopus tropicalis
aacuggcccgcaaagucccgcuuc

SEQ ID NO: 3981 - RNA, 22 nt, Xenopus tropicalis
uguaacagcaacuccaugugga

SEQ ID NO: 3982 - RNA, 21 nt, Xenopus tropicalis
uagguaguuucauguuguugg

SEQ ID NO: 3983 - RNA, 21 nt, Xenopus tropicalis
uagguaguuuuauguuguugg

SEQ ID NO: 3984 - RNA, 23 nt, Xenopus tropicalis
cccaguguucagacuaccuguuc

SEQ ID NO: 3985 - RNA, 22 nt, Xenopus tropicalis
uacaguagucugcacauugguu

SEQ ID NO: 3986 - RNA, 23 nt, Xenopus tropicalis
cccaguguucagacuacguguuc

SEQ ID NO: 3987 - RNA, 23 nt, Xenopus tropicalis
ugugcaaaucuaugcaaaacuga

SEQ ID NO: 3988 - RNA, 23 nt, Xenopus tropicalis
ugugcaaauccaugcaaaacuga

SEQ ID NO: 3989 - RNA, 21 nt, Xenopus tropicalis
uggaauguaaagaaguaugua

SEQ ID NO: 3990 - RNA, 21 nt, Xenopus tropicalis
uggaauguuaagaaguaugua

SEQ ID NO: 3991 - RNA, 22 nt, Xenopus tropicalis
uaacacugucugguaacgaugu

SEQ ID NO: 3992 - RNA, 23 nt, Xenopus tropicalis
uaauacugccugguaaugaugau

SEQ ID NO: 3993 - RNA, 22 nt, Xenopus tropicalis
aggggcauagggcaugggaaaa

SEQ ID NO: 3994 - RNA, 22 nt, Xenopus tropicalis
uuuccuaugcauauaccucuuu

SEQ ID NO: 3995 - RNA, 22 nt, Xenopus tropicalis
gugaaauguuuaggaccacuug

SEQ ID NO: 3996 - RNA, 22 nt, Xenopus tropicalis
uucccuuugucauccuaugccu

SEQ ID NO: 3997 - RNA, 22 nt, Xenopus tropicalis
uccuucauuccaccggagucug

SEQ ID NO: 3998 - RNA, 22 nt, Xenopus tropicalis
uccuucauuccaccggauccug

SEQ ID NO: 3999 - RNA, 22 nt, Xenopus tropicalis
uggaauguaaggaagugugugg

SEQ ID NO: 4000 - RNA, 22 nt, Xenopus tropicalis
auaagacgagcauaaagcuugu

SEQ ID NO: 4001 - RNA, 23 nt, Xenopus tropicalis
uaaagugcuuauagugcagguag

SEQ ID NO: 4002 - RNA, 21 nt, Xenopus tropicalis
acugcauaaugagcacuuaaa

SEQ ID NO: 4003 - RNA, 23 nt, Xenopus tropicalis
caaagugcucauagugcagguag

SEQ ID NO: 4004 - RNA, 22 nt, Xenopus tropicalis
cugugcgugugacagcggcuaa

SEQ ID NO: 4005 - RNA, 21 nt, Xenopus tropicalis
uaacagucuacagucauggcu

SEQ ID NO: 4006 - RNA, 21 nt, Xenopus tropicalis
acagcaggcacagacaggcag

SEQ ID NO: 4007 - RNA, 21 nt, Xenopus tropicalis
augaccuaugaaaugacagcc

SEQ ID NO: 4008 - RNA, 21 nt, Xenopus tropicalis
uaaucucagcuggcaacugug

SEQ ID NO: 4009 - RNA, 24 nt, Xenopus tropicalis
uacugcaucaggaacugauuggau

SEQ ID NO: 4010 - RNA, 21 nt, Xenopus tropicalis
uugugcuugaucuaaccaugu

SEQ ID NO: 4011 - RNA, 21 nt, Xenopus tropicalis
ugauuguccaaacgcaauucu

SEQ ID NO: 4012 - RNA, 22 nt, Xenopus tropicalis
aagcugccaguugaagaacugu

SEQ ID NO: 4013 - RNA, 21 nt, Xenopus tropicalis
aguucuucaguggcaagcuuu

SEQ ID NO: 4014 - RNA, 23 nt, Xenopus tropicalis
agcuacauugucugcuggguuuc

SEQ ID NO: 4015 - RNA, 24 nt, Xenopus tropicalis
agcuacaucuggcuacugggucuc

SEQ ID NO: 4016 - RNA, 21 nt, Xenopus tropicalis
ugucaguuugucaaauacccc

SEQ ID NO: 4017 - RNA, 21 nt, Xenopus tropicalis
aucacauugccagggauuucc

SEQ ID NO: 4018 - RNA, 21 nt, Xenopus tropicalis
aucacauugccagggauuacc

SEQ ID NO: 4019 - RNA, 22 nt, Xenopus tropicalis
uggcucaguucagcaggaacag

SEQ ID NO: 4020 - RNA, 21 nt, Xenopus tropicalis
uggcucaguucagcaggacag

SEQ ID NO: 4021 - RNA, 22 nt, Xenopus tropicalis
cauugcacuugucucggucuga

SEQ ID NO: 4022 - RNA, 21 nt, Xenopus tropicalis
uucaaguaauccaggauaggc

SEQ ID NO: 4023 - RNA, 21 nt, Xenopus tropicalis
uucacaguggcuaaguuccgc

SEQ ID NO: 4024 - RNA, 21 nt, Xenopus tropicalis
uucacaguggcuaaguucugc

SEQ ID NO: 4025 - RNA, 21 nt, Xenopus tropicalis
uucacaguggcuaaguuccac

SEQ ID NO: 4026 - RNA, 21 nt, Xenopus tropicalis
uagcaccauuugaaaucgguu

SEQ ID NO: 4027 - RNA, 23 nt, Xenopus tropicalis
uagcaccauuugaaaucaguguu

SEQ ID NO: 4028 - RNA, 20 nt, Xenopus tropicalis
uagcaccauuugaaaucggu

SEQ ID NO: 4029 - RNA, 22 nt, Xenopus tropicalis
ugaccgaucucucuugguguuc

SEQ ID NO: 4030 - RNA, 23 nt, Xenopus tropicalis
uagcaccauaugaaaucaguguc

SEQ ID NO: 4031 - RNA, 23 nt, Xenopus tropicalis
cagugcaauaguauugucaaagc

SEQ ID NO: 4032 - RNA, 23 nt, Xenopus tropicalis
uaagugcuccaauguuuuagugg

SEQ ID NO: 4033 - RNA, 22 nt, Xenopus tropicalis
cuuucagucagauguuugcagc

SEQ ID NO: 4034 - RNA, 22 nt, Xenopus tropicalis
uguaaacauccucgacuggaag

SEQ ID NO: 4035 - RNA, 22 nt, Xenopus tropicalis
uguaaacauccuacacucagcu

SEQ ID NO: 4036 - RNA, 23 nt, Xenopus tropicalis
uguaaacauccuacacucucagc

SEQ ID NO: 4037 - RNA, 22 nt, Xenopus tropicalis
uguaaacauccccgacuggaag

SEQ ID NO: 4038 - RNA, 20 nt, Xenopus tropicalis
uguaaacauccuugacugga

SEQ ID NO: 4039 - RNA, 22 nt, Xenopus tropicalis
aggcaagauguuggcauagcug

SEQ ID NO: 4040 - RNA, 22 nt, Xenopus tropicalis
uccagcaucagugauuuuguug

SEQ ID NO: 4041 - RNA, 19 nt, Xenopus tropicalis
gugcauuguaguugcauug

SEQ ID NO: 4042 - RNA, 19 nt, Xenopus tropicalis
gugcauuguuguugcauug

SEQ ID NO: 4043 - RNA, 23 nt, Xenopus tropicalis
uggcagugucuuagcugguuguu

SEQ ID NO: 4044 - RNA, 23 nt, Xenopus tropicalis
caggcaguguaguuagcugauug

SEQ ID NO: 4045 - RNA, 21 nt, Xenopus tropicalis
aauugcacgguauccaucugu

SEQ ID NO: 4046 - RNA, 22 nt, Xenopus tropicalis
cggguggaucacgaugcaauuu

SEQ ID NO: 4047 - RNA, 22 nt, Xenopus tropicalis
uaaugccccuaaaaauccuuau

SEQ ID NO: 4048 - RNA, 22 nt, Xenopus tropicalis
aauugcacuguagcaaugguga

SEQ ID NO: 4049 - RNA, 22 nt, Xenopus tropicalis
agaucagaaggugauuguggcu

SEQ ID NO: 4050 - RNA, 23 nt, Xenopus tropicalis
aaugacacgaucacucccguuga

SEQ ID NO: 4051 - RNA, 22 nt, Xenopus tropicalis
uaagugcucucuaguucgguug

SEQ ID NO: 4052 - RNA, 22 nt, Xenopus tropicalis
uaauacugucugguaaugccgu

SEQ ID NO: 4053 - RNA, 22 nt, Xenopus tropicalis
aggcaguguaauguuagcuggu

SEQ ID NO: 4054 - RNA, 22 nt, Xenopus tropicalis
aaaccguuaccauuacugaguu

SEQ ID NO: 4055 - RNA, 22 nt, Xenopus tropicalis
uaugugcccuuggacuacaucg

SEQ ID NO: 4056 - RNA, 23 nt, Xenopus tropicalis
agugacaucauauguacggcugc

SEQ ID NO: 4057 - RNA, 23 nt, Xenopus tropicalis
uuaagacuugcagugauguuuag

SEQ ID NO: 4058 - RNA, 22 nt, Xenopus tropicalis
uggaagacuagugauuuuguug

SEQ ID NO: 4059 - RNA, 22 nt, Xenopus tropicalis
ucuuugguuaucuagcuguaug

SEQ ID NO: 4060 - RNA, 21 nt, Xenopus tropicalis
uaaagcuagauaaccgaaagu

SEQ ID NO: 4061 - RNA, 21 nt, Xenopus tropicalis
uauugcacuugucccggccug

SEQ ID NO: 4062 - RNA, 21 nt, Xenopus tropicalis
uauugcacucgucccggccuc

SEQ ID NO: 4063 - RNA, 23 nt, Xenopus tropicalis
caaagugcuguucgugcagguag

SEQ ID NO: 4064 - RNA, 23 nt, Xenopus tropicalis
ucaagugcuguucgugcagguag

SEQ ID NO: 4065 - RNA, 23 nt, Xenopus tropicalis
uuuggcacuagcacauuuuugcu

SEQ ID NO: 4066 - RNA, 22 nt, Xenopus tropicalis
ugagguaguaaguuguauuguu

SEQ ID NO: 4067 - RNA, 22 nt, Xenopus tropicalis
aacccguagauccgaucuugug

SEQ ID NO: 4068 - RNA, 23 nt, Xenopus tropicalis
ucuuugguuaucuagcuguauga

SEQ ID NO: 4069 - RNA, 21 nt, Xenopus tropicalis
uaaagcuagauaaccgaaagu

SEQ ID NO: 4070 - RNA, 23 nt, Xenopus tropicalis
ucuuugguuaccuagcuguauga

SEQ ID NO: 4071 - RNA, 21 nt, Xenopus tropicalis
uaaagcuagacaaccgaacgu

SEQ ID NO: 4072 - RNA, 20 nt, Zea mays
ugacagaagagagugagcac

SEQ ID NO: 4073 - RNA, 20 nt, Zea mays
ugacagaagagagugagcac

SEQ ID NO: 4074 - RNA, 20 nt, Zea mays
ugacagaagagagugagcac

SEQ ID NO: 4075 - RNA, 20 nt, Zea mays
ugacagaagagagugagcac

SEQ ID NO: 4076 - RNA, 20 nt, Zea mays
ugacagaagagagugagcac

SEQ ID NO: 4077 - RNA, 20 nt, Zea mays
ugacagaagagagugagcac

SEQ ID NO: 4078 - RNA, 20 nt, Zea mays
ugacagaagagagugagcac

SEQ ID NO: 4079 - RNA, 20 nt, Zea mays
ugacagaagagagugagcac

SEQ ID NO: 4080 - RNA, 20 nt, Zea mays
ugacagaagagagugagcac

SEQ ID NO: 4081 - RNA, 21 nt, Zea mays
ugacagaagagagagagcaca

SEQ ID NO: 4082 - RNA, 20 nt, Zea mays
ugacagaagagagcgagcac

SEQ ID NO: 4083 - RNA, 21 nt, Zea mays
uuuggauugaagggagcucug

SEQ ID NO: 4084 - RNA, 21 nt, Zea mays
uuuggauugaagggagcucug

SEQ ID NO: 4085 - RNA, 21 nt, Zea mays
cuuggauugaagggagcuccu

SEQ ID NO: 4086 - RNA, 21 nt, Zea mays
cuuggauugaagggagcuccu

SEQ ID NO: 4087 - RNA, 21 nt, Zea mays
ugccuggcucccuguaugcca

SEQ ID NO: 4088 - RNA, 21 nt, Zea mays
ugccuggcucccuguaugcca

SEQ ID NO: 4089 - RNA, 21 nt, Zea mays
ugccuggcucccuguaugcca

SEQ ID NO: 4090 - RNA, 21 nt, Zea mays
ugccuggcucccuguaugcca

SEQ ID NO: 4091 - RNA, 21 nt, Zea mays
ugccuggcucccuguaugcca

SEQ ID NO: 4092 - RNA, 21 nt, Zea mays
ugccuggcucccuguaugccg

SEQ ID NO: 4093 - RNA, 20 nt, Zea mays
ucgauaaaccucugcaucca

SEQ ID NO: 4094 - RNA, 21 nt, Zea mays
uggagaagcagggcacgugca

SEQ ID NO: 4095 - RNA, 21 nt, Zea mays
uggagaagcagggcacgugca

SEQ ID NO: 4096 - RNA, 21 nt, Zea mays
uggagaagcagggcacgugca

SEQ ID NO: 4097 - RNA, 21 nt, Zea mays
uggagaagcagggcacgugca

SEQ ID NO: 4098 - RNA, 21 nt, Zea mays
ucggaccaggcuucauucccc

SEQ ID NO: 4099 - RNA, 20 nt, Zea mays
ucggaccaggcuucauuccc

SEQ ID NO: 4100 - RNA, 20 nt, Zea mays
ucggaccaggcuucauuccc

SEQ ID NO: 4101 - RNA, 20 nt, Zea mays
ucggaccaggcuucauuccc

SEQ ID NO: 4102 - RNA, 20 nt, Zea mays
ucggaccaggcuucauuccc

SEQ ID NO: 4103 - RNA, 20 nt, Zea mays
ucggaccaggcuucauuccc

SEQ ID NO: 4104 - RNA, 20 nt, Zea mays
ucggaccaggcuucauuccc

SEQ ID NO: 4105 - RNA, 20 nt, Zea mays
ucggaccaggcuucauuccc

SEQ ID NO: 4106 - RNA, 20 nt, Zea mays
ucggaccaggcuucauuccc

SEQ ID NO: 4107 - RNA, 21 nt, Zea mays
ucggaccaggcuucaaucccu

SEQ ID NO: 4108 - RNA, 21 nt, Zea mays
ucggaccaggcuucaaucccu

SEQ ID NO: 4109 - RNA, 21 nt, Zea mays
ucggaccaggcuucauuccuc

SEQ ID NO: 4110 - RNA, 21 nt, Zea mays
ucggaccaggcuucauuccuc

SEQ ID NO: 4111 - RNA, 21 nt, Zea mays
ugaagcugccagcaugaucua

SEQ ID NO: 4112 - RNA, 21 nt, Zea mays
ugaagcugccagcaugaucua

SEQ ID NO: 4113 - RNA, 21 nt, Zea mays
ugaagcugccagcaugaucua

SEQ ID NO: 4114 - RNA, 21 nt, Zea mays
ugaagcugccagcaugaucua

SEQ ID NO: 4115 - RNA, 21 nt, Zea mays
ugaagcugccagcaugaucug

SEQ ID NO: 4116 - RNA, 21 nt, Zea mays
ugaagcugccagcaugaucug

SEQ ID NO: 4117 - RNA, 21 nt, Zea mays
ugaagcugccagcaugaucug

SEQ ID NO: 4118 - RNA, 21 nt, Zea mays
ugaagcugccagcaugaucug

SEQ ID NO: 4119 - RNA, 21 nt, Zea mays
ugaagcugccagcaugaucug

SEQ ID NO: 4120 - RNA, 21 nt, Zea mays
ucgcuuggugcagaucgggac

SEQ ID NO: 4121 - RNA, 21 nt, Zea mays
ucgcuuggugcagaucgggac

SEQ ID NO: 4122 - RNA, 21 nt, Zea mays
cagccaaggaugacuugccga

SEQ ID NO: 4123 - RNA, 21 nt, Zea mays
cagccaaggaugacuugccga

SEQ ID NO: 4124 - RNA, 21 nt, Zea mays
cagccaaggaugacuugccgg

SEQ ID NO: 4125 - RNA, 21 nt, Zea mays
uagccaaggagacugccuaug

SEQ ID NO: 4126 - RNA, 21 nt, Zea mays
uagccaaggagacugccuacg

SEQ ID NO: 4127 - RNA, 21 nt, Zea mays
uagccaaggaugacuugccua

SEQ ID NO: 4128 - RNA, 21 nt, Zea mays
uagccaaggaugacuugccua

SEQ ID NO: 4129 - RNA, 21 nt, Zea mays
uagccaaggaugacuugccua

SEQ ID NO: 4130 - RNA, 21 nt, Zea mays
uagccaaggaugacuugccug

SEQ ID NO: 4131 - RNA, 21 nt, Zea mays
uagccaaggaugacuugccug

SEQ ID NO: 4132 - RNA, 21 nt, Zea mays
uagccaaggaugacuugccug

SEQ ID NO: 4133 - RNA, 20 nt, Zea mays
ugauugagccgcgccaauau

SEQ ID NO: 4134 - RNA, 20 nt, Zea mays
uugagccgugccaauaucac

SEQ ID NO: 4135 - RNA, 21 nt, Zea mays
ugacugagccgugccaauauc

SEQ ID NO: 4136 - RNA, 21 nt, Zea mays
ugauugagccgugccaauauc

SEQ ID NO: 4137 - RNA, 21 nt, Zea mays
ugauugagccgugccaauauc

SEQ ID NO: 4138 - RNA, 21 nt, Zea mays
uugagccgugccaauaucaca

SEQ ID NO: 4139 - RNA, 21 nt, Zea mays
gaggugagccgagccaauauc

SEQ ID NO: 4140 - RNA, 21 nt, Zea mays
gugagccgaaccaauaucacu

SEQ ID NO: 4141 - RNA, 21 nt, Zea mays
ugauugagccgugccaauauc

SEQ ID NO: 4142 - RNA, 21 nt, Zea mays
ugauugagccgugccaauauc

SEQ ID NO: 4143 - RNA, 21 nt, Zea mays
gugagccgaaccaauaucacu

SEQ ID NO: 4144 - RNA, 20 nt, Zea mays
agaaucuugaugaugcugca

SEQ ID NO: 4145 - RNA, 20 nt, Zea mays
agaaucuugaugaugcugca

SEQ ID NO: 4146 - RNA, 20 nt, Zea mays
agaaucuugaugaugcugca

SEQ ID NO: 4147 - RNA, 20 nt, Zea mays
agaaucuugaugaugcugca

SEQ ID NO: 4148 - RNA, 21 nt, Zea mays
ggaaucuugaugaugcugcau

SEQ ID NO: 4149 - RNA, 20 nt, Zea mays
uuggacugaagggugcuccc

SEQ ID NO: 4150 - RNA, 20 nt, Zea mays
uuggacugaagggugcuccc

SEQ ID NO: 4151 - RNA, 20 nt, Zea mays
uuggacugaagggugcuccc

SEQ ID NO: 4152 - RNA, 20 nt, Zea mays
uuggacugaagggugcuccc

SEQ ID NO: 4153 - RNA, 22 nt, Zea mays
uccaaagggaucgcauugaucu

SEQ ID NO: 4154 - RNA, 20 nt, Zea mays
uuggcauucuguccaccucc

SEQ ID NO: 4155 - RNA, 20 nt, Zea mays
uuggcauucuguccaccucc

SEQ ID NO: 4156 - RNA, 21 nt, Zea mays
gugaaguguuugggggaacuc

SEQ ID NO: 4157 - RNA, 21 nt, Zea mays
gugaaguguuugggggaacuc

SEQ ID NO: 4158 - RNA, 21 nt, Zea mays
gugaaguguuuggaggaacuc

SEQ ID NO: 4159 - RNA, 21 nt, Zea mays
uuccacagcuuucuugaacug

SEQ ID NO: 4160 - RNA, 21 nt, Zea mays
uuccacagcuuucuugaacug

SEQ ID NO: 4161 - RNA, 21 nt, Zea mays
ugccaaaggagaauugcccug

SEQ ID NO: 4162 - RNA, 21 nt, Zea mays
ugccaaaggagagcuguccug

SEQ ID NO: 4163 - RNA, 21 nt, Zea mays
ugccaaaggagaauugcccug

SEQ ID NO: 4164 - RNA, 21 nt, Zea mays
ugccaaaggagagcugcccug

SEQ ID NO: 4165 - RNA, 21 nt, Zea mays
ugccaaaggagaguugcccug

SEQ ID NO: 4166 - RNA, 21 nt, Zea mays
ugccaaaggaaauuugccccg

SEQ ID NO: 4167 - RNA, 21 nt, Zea mays
cugcacugccucuucccuggc

SEQ ID NO: 4168 - DNA, 28 bp, Artificial Sequence
  Synthetic
cagtcatttgggtgagatcactttgaaa

SEQ ID NO: 4169 - DNA, 28 bp, Artificial Sequence
  Synthetic
cagtcatttgggtgaggtagttggttgt

SEQ ID NO: 4170 - DNA, 28 bp, Artificial Sequence
  Synthetic
cagtcatttgggtggaatgtaaagaagt

SEQ ID NO: 4171 - DNA, 28 bp, Artificial Sequence
  Synthetic
cagtcatttgggaccctgtagatccgaa

SEQ ID NO: 4172 - DNA, 28 bp, Artificial Sequence
  Synthetic
cagtcatttgggaacccgtagatccgaa

SEQ ID NO: 4173 - DNA, 28 bp, Artificial Sequence
  Synthetic
cagtcatttgggtaaggcacgcggtgaa

SEQ ID NO: 4174 - DNA, 28 bp, Artificial Sequence
  Synthetic
cagtcatttgggtccctgagaccctaac

SEQ ID NO: 4175 - DNA, 28 bp, Artificial Sequence
  Synthetic
cagtcatttgggttggtccccttcaacc

SEQ ID NO: 4176 - DNA, 28 bp, Artificial Sequence
  Synthetic
cagtcatttgggtatcacagccattttg

SEQ ID NO: 4177 - DNA, 28 bp, Artificial Sequence
  Synthetic
cagtcatttgggtcagtctttttctctc

SEQ ID NO: 4178 - DNA, 28 bp, Artificial Sequence
  Synthetic
cagtcatttgggtggacggagaactgat

SEQ ID NO: 4179 - DNA, 28 bp, Artificial Sequence
  Synthetic
cagtcatttggggctcatcaaagctggc

SEQ ID NO: 4180 - DNA, 28 bp, Artificial Sequence
  Synthetic
cagtcatttgggttgtgcgtgtgacaac

SEQ ID NO: 4181 - DNA, 28 bp, Artificial Sequence
  Synthetic
cagtcatttgggtgattgtccaaacgca

SEQ ID NO: 4182 - DNA, 28 bp, Artificial Sequence
  Synthetic
cagtcatttgggtgtaatggcactggaa

SEQ ID NO: 4183 - DNA, 28 bp, Artificial Sequence
  Synthetic
cagtcatttgggtcaggtacctgaagta

SEQ ID NO: 4184 - DNA, 28 bp, Artificial Sequence
  Synthetic
cagtcatttgggcagcgaggtatagagt

SEQ ID NO: 4185 - DNA, 28 bp, Artificial Sequence
  Synthetic
cagtcatttgggtaaatgcactatctgg

SEQ ID NO: 4186 - DNA, 28 bp, Artificial Sequence
  Synthetic
cagtcatttgggtcggtgggactttcgt

SEQ ID NO: 4187 - DNA, 28 bp, Artificial Sequence
  Synthetic
cagtcatttgggtgactagatccacact

SEQ ID NO: 4188 - DNA, 28 bp, Artificial Sequence
  Synthetic
cagtcatttgggtgtcatggaattgctc

SEQ ID NO: 4189 - DNA, 28 bp, Artificial Sequence
  Synthetic
cagtcatttgggaatctagcctcttcta

SEQ ID NO: 4190 - DNA, 28 bp, Artificial Sequence
  Synthetic
cagtcatttgggtaaatatcagctggta

SEQ ID NO: 4191 - DNA, 28 bp, Artificial Sequence
  Synthetic
cagtcatttgggattgtacttcatcagg

SEQ ID NO: 4192 - DNA, 28 bp, Artificial Sequence
  Synthetic
cagtcatttgggtcacaacctccttgag

SEQ ID NO: 4193 - DNA, 28 bp, Artificial Sequence
  Synthetic
cagtcatttgggaatcacaggagtatac

SEQ ID NO: 4194 - DNA, 28 bp, Artificial Sequence
  Synthetic
cagtcatttgggttttgattgttgctca

SEQ ID NO: 4195 - DNA, 28 bp, Artificial Sequence
  Synthetic
cagtcatttgggtgaacacatctggtgg

SEQ ID NO: 4196 - DNA, 28 bp, Artificial Sequence
  Synthetic
cagtcatttgggtggaagactagtgatt

SEQ ID NO: 4197 - DNA, 28 bp, Artificial Sequence
  Synthetic
cagtcatttgggtaaagctagattacca

SEQ ID NO: 4198 - DNA, 28 bp, Artificial Sequence
  Synthetic
cagtcatttgggtaatactgtcaggtaa

SEQ ID NO: 4199 - DNA, 28 bp, Artificial Sequence
  Synthetic
cagtcatttgggtattgcacttgtcccg

SEQ ID NO: 4200 - DNA, 28 bp, Artificial Sequence
  Synthetic
cagtcatttgggaattgcacttgtcccg

SEQ ID NO: 4201 - DNA, 28 bp, Artificial Sequence
  Synthetic
cagtcatttgggtctttggttatctagc

SEQ ID NO: 4202 - DNA, 28 bp, Artificial Sequence
  Synthetic
cagtcatttgggactttggtgattttag

SEQ ID NO: 4203 - DNA, 28 bp, Artificial Sequence
  Synthetic
cagtcatttgggtctttggtattctagc

SEQ ID NO: 4204 - DNA, 28 bp, Artificial Sequence
  Synthetic
cagtcatttgggacgtatactgaatgta

SEQ ID NO: 4205 - DNA, 28 bp, Artificial Sequence
  Synthetic
cagtcatttgggaacccgtagatccgaa

SEQ ID NO: 4206 - DNA, 28 bp, Artificial Sequence
  Synthetic
cagtcatttgggtacagtactgtgataa

SEQ ID NO: 4207 - DNA, 28 bp, Artificial Sequence
  Synthetic
cagtcatttgggagcagcattgtacagg

SEQ ID NO: 4208 - DNA, 28 bp, Artificial Sequence
  Synthetic
cagtcatttgggaaaagtgcttacagtg

SEQ ID NO: 4209 - DNA, 28 bp, Artificial Sequence
  Synthetic
cagtcatttgggtaaagtgctgacagtg

SEQ ID NO: 4210 - DNA, 28 bp, Artificial Sequence
  Synthetic
cagtcatttgggtaccctgtagatccga

SEQ ID NO: 4211 - DNA, 28 bp, Artificial Sequence
  Synthetic
cagtcatttgggttaaggcacgcggtga

SEQ ID NO: 4212 - DNA, 28 bp, Artificial Sequence
  Synthetic
cagtcatttgggtccctgagaccctaac

SEQ ID NO: 4213 - DNA, 28 bp, Artificial Sequence
  Synthetic
cagtcatttgggtcggatccgtctgagc

SEQ ID NO: 4214 - DNA, 28 bp, Artificial Sequence
  Synthetic
cagtcatttgggtcacagtgaaccggtc

SEQ ID NO: 4215 - DNA, 28 bp, Artificial Sequence
  Synthetic
cagtcatttgggttggtccccttcaacc

SEQ ID NO: 4216 - DNA, 28 bp, Artificial Sequence
  Synthetic
cagtcatttgggtatggctttttattcc

SEQ ID NO: 4217 - DNA, 28 bp, Artificial Sequence
  Synthetic
cagtcatttgggtagcagcacataatgg

SEQ ID NO: 4218 - DNA, 28 bp, Artificial Sequence
  Synthetic
cagtcatttgggtagcagcacatcatgg

SEQ ID NO: 4219 - DNA, 28 bp, Artificial Sequence
  Synthetic
cagtcatttgggtagcagcacgtaaata

SEQ ID NO: 4220 - DNA, 28 bp, Artificial Sequence
  Synthetic
cagtcatttgggactgcagtgaaggcac

SEQ ID NO: 4221 - DNA, 28 bp, Artificial Sequence
  Synthetic
cagtcatttgggcaaagtgcttacagtg

SEQ ID NO: 4222 - DNA, 28 bp, Artificial Sequence
  Synthetic
cagtcatttgggtaaggtgcatctagtg

SEQ ID NO: 4223 - DNA, 28 bp, Artificial Sequence
  Synthetic
cagtcatttgggtgtaacagcaactcca

SEQ ID NO: 4224 - DNA, 28 bp, Artificial Sequence
  Synthetic
cagtcatttgggtaggtagtttcatgtt

SEQ ID NO: 4225 - DNA, 28 bp, Artificial Sequence
  Synthetic
cagtcatttgggttcaccaccttctcca

SEQ ID NO: 4226 - DNA, 28 bp, Artificial Sequence
  Synthetic
cagtcatttgggggtccagaggggagct

SEQ ID NO: 4227 - DNA, 28 bp, Artificial Sequence
  Synthetic
cagtcatttgggtgtgcaaatctatgca

SEQ ID NO: 4228 - DNA, 28 bp, Artificial Sequence
  Synthetic
cagtcatttgggtgtgcaaatccatgca

SEQ ID NO: 4229 - DNA, 28 bp, Artificial Sequence
  Synthetic
cagtcatttgggtaaagtgcttatagtg

SEQ ID NO: 4230 - DNA, 28 bp, Artificial Sequence
  Synthetic
cagtcatttgggtccttcattccaccgg

SEQ ID NO: 4231 - DNA, 28 bp, Artificial Sequence
  Synthetic
cagtcatttgggtagcttatcagactga

SEQ ID NO: 4232 - DNA, 28 bp, Artificial Sequence
  Synthetic
cagtcatttgggacagcaggcacagaca

SEQ ID NO: 4233 - DNA, 28 bp, Artificial Sequence
  Synthetic
cagtcatttgggttgtgcttgatctaac

SEQ ID NO: 4234 - DNA, 28 bp, Artificial Sequence
  Synthetic
cagtcatttgggaagctgccagttgaag

SEQ ID NO: 4235 - DNA, 28 bp, Artificial Sequence
  Synthetic
cagtcatttgggagctacatctggctac

SEQ ID NO: 4236 - DNA, 28 bp, Artificial Sequence
  Synthetic
cagtcatttgggatcacattgccaggga

SEQ ID NO: 4237 - DNA, 28 bp, Artificial Sequence
  Synthetic
cagtcatttgggttcacagtggctaagt

SEQ ID NO: 4238 - DNA, 28 bp, Artificial Sequence
  Synthetic
cagtcatttgggaaggagctcacagtct

SEQ ID NO: 4239 - DNA, 28 bp, Artificial Sequence
  Synthetic
cagtcatttgggctagcaccatctgaaa

SEQ ID NO: 4240 - DNA, 28 bp, Artificial Sequence
  Synthetic
cagtcatttgggtagcaccatttgaaat

SEQ ID NO: 4241 - DNA, 28 bp, Artificial Sequence
  Synthetic
cagtcatttgggtgtaaacatcctacac

SEQ ID NO: 4242 - DNA, 28 bp, Artificial Sequence
  Synthetic
cagtcatttgggtggcagtgtcttagct

SEQ ID NO: 4243 - DNA, 28 bp, Artificial Sequence
  Synthetic
cagtcatttgggtctttggttatctagc

SEQ ID NO: 4244 - DNA, 28 bp, Artificial Sequence
  Synthetic
cagtcatttgggtattgcacttgtcccg

SEQ ID NO: 4245 - DNA, 28 bp, Artificial Sequence
  Synthetic
cagtcatttgggaaagtgctgttcgtgc

SEQ ID NO: 4246 - DNA, 28 bp, Artificial Sequence
  Synthetic
cagtcatttgggtgaggtagtaagttgt

SEQ ID NO: 4247 - DNA, 28 bp, Artificial Sequence
  Synthetic
cagtcatttgggtgagatcattgtgaaa

SEQ ID NO: 4248 - DNA, 28 bp, Artificial Sequence
  Synthetic
cagtcatttgggtggaatgtaaagaagt

SEQ ID NO: 4249 - DNA, 28 bp, Artificial Sequence
  Synthetic
cagtcatttgggtgagtattacatcagg

SEQ ID NO: 4250 - DNA, 28 bp, Artificial Sequence
  Synthetic
cagtcatttgggtaaggcacgcggtgaa

SEQ ID NO: 4251 - DNA, 28 bp, Artificial Sequence
  Synthetic
cagtcatttgggcccctgagaccctaac

SEQ ID NO: 4252 - DNA, 28 bp, Artificial Sequence
  Synthetic
cagtcatttgggttggtccccttcaacc

SEQ ID NO: 4253 - DNA, 28 bp, Artificial Sequence
  Synthetic
cagtcatttgggtggacggagaactgat

SEQ ID NO: 4254 - DNA, 28 bp, Artificial Sequence
  Synthetic
cagtcatttgggtatcacagccagcttt

SEQ ID NO: 4255 - DNA, 28 bp, Artificial Sequence
  Synthetic
cagtcatttgggttgtgcgtgtgacagc

SEQ ID NO: 4256 - DNA, 28 bp, Artificial Sequence
  Synthetic
cagtcatttgggtgattgtccaaacgca

SEQ ID NO: 4257 - DNA, 28 bp, Artificial Sequence
  Synthetic
cagtcatttggggtaaatggcactggaa

SEQ ID NO: 4258 - DNA, 28 bp, Artificial Sequence
  Synthetic
cagtcatttgggtaggaacttcataccg

SEQ ID NO: 4259 - DNA, 28 bp, Artificial Sequence
  Synthetic
cagtcatttgggtaaatgcactatctgg

SEQ ID NO: 4260 - DNA, 28 bp, Artificial Sequence
  Synthetic
cagtcatttgggtcggtgggactttcgt

SEQ ID NO: 4261 - DNA, 28 bp, Artificial Sequence
  Synthetic
cagtcatttgggtgtcatggagttgctc

SEQ ID NO: 4262 - DNA, 28 bp, Artificial Sequence
  Synthetic
cagtcatttggggatttagcctctccta

SEQ ID NO: 4263 - DNA, 28 bp, Artificial Sequence
  Synthetic
cagtcatttgggattgtacttcatcagg

SEQ ID NO: 4264 - DNA, 28 bp, Artificial Sequence
  Synthetic
cagtcatttgggttttgattgttgctca

SEQ ID NO: 4265 - DNA, 28 bp, Artificial Sequence
  Synthetic
cagtcatttgggtgaacacagctggtgg

SEQ ID NO: 4266 - DNA, 28 bp, Artificial Sequence
  Synthetic
cagtcatttgggtggaagactagtgatt

SEQ ID NO: 4267 - DNA, 28 bp, Artificial Sequence
  Synthetic
cagtcatttgggtaatactgtcaggtaa

SEQ ID NO: 4268 - DNA, 28 bp, Artificial Sequence
  Synthetic
cagtcatttgggtctttggttatctagc

SEQ ID NO: 4269 - DNA, 28 bp, Artificial Sequence
  Synthetic
cagtcatttggggctttggtaatctagc

SEQ ID NO: 4270 - DNA, 28 bp, Artificial Sequence
  Synthetic
cagtcatttgggacgtatactgaatgta

SEQ ID NO: 4271 - DNA, 28 bp, Artificial Sequence
  Synthetic
cagtcatttgggtgacagaagagagtga

SEQ ID NO: 4272 - DNA, 28 bp, Artificial Sequence
  Synthetic
cagtcatttgggtgacagaagagagtga

SEQ ID NO: 4273 - DNA, 28 bp, Artificial Sequence
  Synthetic
cagtcatttgggtgacagaagagagtga

SEQ ID NO: 4274 - DNA, 28 bp, Artificial Sequence
  Synthetic
cagtcatttgggtgacagaagagagtga

SEQ ID NO: 4275 - DNA, 28 bp, Artificial Sequence
  Synthetic
cagtcatttgggtgacagaagagagtga

SEQ ID NO: 4276 - DNA, 28 bp, Artificial Sequence
  Synthetic
cagtcatttgggtgacagaagagagtga

SEQ ID NO: 4277 - DNA, 28 bp, Artificial Sequence
  Synthetic
cagtcatttgggcgacagaagagagtga

SEQ ID NO: 4278 - DNA, 28 bp, Artificial Sequence
  Synthetic
cagtcatttgggttgacagaagaaagag

SEQ ID NO: 4279 - DNA, 28 bp, Artificial Sequence
  Synthetic
cagtcatttgggttgacagaagatagag

SEQ ID NO: 4280 - DNA, 28 bp, Artificial Sequence
  Synthetic
cagtcatttgggttgacagaagatagag

SEQ ID NO: 4281 - DNA, 28 bp, Artificial Sequence
  Synthetic
cagtcatttgggttgacagaagatagag

SEQ ID NO: 4282 - DNA, 28 bp, Artificial Sequence
  Synthetic
cagtcatttgggtgacagaagatagaga

SEQ ID NO: 4283 - DNA, 28 bp, Artificial Sequence
  Synthetic
cagtcatttgggtcccaaatgtagacaa

SEQ ID NO: 4284 - DNA, 28 bp, Artificial Sequence
  Synthetic
cagtcatttgggccccaaatgtagacaa

SEQ ID NO: 4285 - DNA, 28 bp, Artificial Sequence
  Synthetic
cagtcatttgggtttggattgaagggag

SEQ ID NO: 4286 - DNA, 28 bp, Artificial Sequence
  Synthetic
cagtcatttgggtttggattgaagggag

SEQ ID NO: 4287 - DNA, 28 bp, Artificial Sequence
  Synthetic
cagtcatttgggtttggattgaagggag

SEQ ID NO: 4288 - DNA, 28 bp, Artificial Sequence
  Synthetic
cagtcatttgggtgcctggctccctgta

SEQ ID NO: 4289 - DNA, 28 bp, Artificial Sequence
  Synthetic
cagtcatttgggtgcctggctccctgta

SEQ ID NO: 4290 - DNA, 28 bp, Artificial Sequence
  Synthetic
cagtcatttgggtgcctggctccctgta

SEQ ID NO: 4291 - DNA, 28 bp, Artificial Sequence
  Synthetic
cagtcatttgggttgaaagtgactacat

SEQ ID NO: 4292 - DNA, 28 bp, Artificial Sequence
  Synthetic
cagtcatttgggtcgataaacctctgca

SEQ ID NO: 4293 - DNA, 28 bp, Artificial Sequence
  Synthetic
cagtcatttgggtcgataaacctctgca

SEQ ID NO: 4294 - DNA, 28 bp, Artificial Sequence
  Synthetic
cagtcatttgggttgaagaggacttgga

SEQ ID NO: 4295 - DNA, 28 bp, Artificial Sequence
  Synthetic
cagtcatttgggtggagaagcagggcac

SEQ ID NO: 4296 - DNA, 28 bp, Artificial Sequence
  Synthetic
cagtcatttgggtggagaagcagggcac

SEQ ID NO: 4297 - DNA, 28 bp, Artificial Sequence
  Synthetic
cagtcatttgggtggagaagcagggcac

SEQ ID NO: 4298 - DNA, 28 bp, Artificial Sequence
  Synthetic
cagtcatttgggtcggaccaggcttcat

SEQ ID NO: 4299 - DNA, 28 bp, Artificial Sequence
  Synthetic
cagtcatttgggtcggaccaggcttcat

SEQ ID NO: 4300 - DNA, 28 bp, Artificial Sequence
  Synthetic
cagtcatttgggtcggaccaggcttcat

SEQ ID NO: 4301 - DNA, 28 bp, Artificial Sequence
  Synthetic
cagtcatttgggtcggaccaggcttcat

SEQ ID NO: 4302 - DNA, 28 bp, Artificial Sequence
  Synthetic
cagtcatttgggtcggaccaggcttcat

SEQ ID NO: 4303 - DNA, 28 bp, Artificial Sequence
  Synthetic
cagtcatttgggtcggaccaggcttcat

SEQ ID NO: 4304 - DNA, 28 bp, Artificial Sequence
  Synthetic
cagtcatttgggtcggaccaggcttcat

SEQ ID NO: 4305 - DNA, 28 bp, Artificial Sequence
  Synthetic
cagtcatttgggtcggaccaggcttcat

SEQ ID NO: 4306 - DNA, 28 bp, Artificial Sequence
  Synthetic
cagtcatttgggtcggaccaggcttcat

SEQ ID NO: 4307 - DNA, 28 bp, Artificial Sequence
  Synthetic
cagtcatttgggtgaagctgccagcatg

SEQ ID NO: 4308 - DNA, 28 bp, Artificial Sequence
  Synthetic
cagtcatttgggtgaagctgccagcatg

SEQ ID NO: 4309 - DNA, 28 bp, Artificial Sequence
  Synthetic
cagtcatttgggttaagctgccagcatg

SEQ ID NO: 4310 - DNA, 28 bp, Artificial Sequence
  Synthetic
cagtcatttgggtgaagctgccagcatg

SEQ ID NO: 4311 - DNA, 28 bp, Artificial Sequence
  Synthetic
cagtcatttgggtcgcttggtgcaggtc

SEQ ID NO: 4312 - DNA, 28 bp, Artificial Sequence
  Synthetic
cagtcatttgggtcgcttggtgcaggtc

SEQ ID NO: 4313 - DNA, 28 bp, Artificial Sequence
  Synthetic
cagtcatttgggcagccaaggatgactt

SEQ ID NO: 4314 - DNA, 28 bp, Artificial Sequence
  Synthetic
cagtcatttgggcagccaaggatgactt

SEQ ID NO: 4315 - DNA, 28 bp, Artificial Sequence
  Synthetic
cagtcatttgggcagccaaggatgactt

SEQ ID NO: 4316 - DNA, 28 bp, Artificial Sequence
  Synthetic
cagtcatttgggtgagccaaggatgact

SEQ ID NO: 4317 - DNA, 28 bp, Artificial Sequence
  Synthetic
cagtcatttgggtgagccaaggatgact

SEQ ID NO: 4318 - DNA, 28 bp, Artificial Sequence
  Synthetic
cagtcatttgggtgagccaaggatgact

SEQ ID NO: 4319 - DNA, 28 bp, Artificial Sequence
  Synthetic
cagtcatttgggtgagccaaggatgact

SEQ ID NO: 4320 - DNA, 28 bp, Artificial Sequence
  Synthetic
cagtcatttgggtccggcaagttgacct

SEQ ID NO: 4321 - DNA, 28 bp, Artificial Sequence
  Synthetic
cagtcatttgggtagccaaggatgactt

SEQ ID NO: 4322 - DNA, 28 bp, Artificial Sequence
  Synthetic
cagtcatttgggtagccaaggatgactt

SEQ ID NO: 4323 - DNA, 28 bp, Artificial Sequence
  Synthetic
cagtcatttgggtagccaaggatgactt

SEQ ID NO: 4324 - DNA, 28 bp, Artificial Sequence
  Synthetic
cagtcatttgggtagccaaggatgactt

SEQ ID NO: 4325 - DNA, 28 bp, Artificial Sequence
  Synthetic
cagtcatttgggtagccaaggatgactt

SEQ ID NO: 4326 - DNA, 28 bp, Artificial Sequence
  Synthetic
cagtcatttgggtagccaaggatgactt

SEQ ID NO: 4327 - DNA, 28 bp, Artificial Sequence
  Synthetic
cagtcatttgggtagccaaggatgactt

SEQ ID NO: 4328 - DNA, 28 bp, Artificial Sequence
  Synthetic
cagtcatttgggtgattgagccgtgtca

SEQ ID NO: 4329 - DNA, 28 bp, Artificial Sequence
  Synthetic
cagtcatttgggtgattgagccgcgcca

SEQ ID NO: 4330 - DNA, 28 bp, Artificial Sequence
  Synthetic
cagtcatttgggttgagccgtgccaata

SEQ ID NO: 4331 - DNA, 28 bp, Artificial Sequence
  Synthetic
cagtcatttgggttgagccgtgccaata

SEQ ID NO: 4332 - DNA, 28 bp, Artificial Sequence
  Synthetic
cagtcatttgggagaatcttgatgatgc

SEQ ID NO: 4333 - DNA, 28 bp, Artificial Sequence
  Synthetic
cagtcatttgggagaatcttgatgatgc

SEQ ID NO: 4334 - DNA, 28 bp, Artificial Sequence
  Synthetic
cagtcatttggggcagcaccattaagat

SEQ ID NO: 4335 - DNA, 28 bp, Artificial Sequence
  Synthetic
cagtcatttgggagaatcttgatgatgc

SEQ ID NO: 4336 - DNA, 28 bp, Artificial Sequence
  Synthetic
cagtcatttgggagaatcttgatgatgc

SEQ ID NO: 4337 - DNA, 28 bp, Artificial Sequence
  Synthetic
cagtcatttgggggaatcttgatgatgc

SEQ ID NO: 4338 - DNA, 28 bp, Artificial Sequence
  Synthetic
cagtcatttgggttcgcttgcagagaga

SEQ ID NO: 4339 - DNA, 28 bp, Artificial Sequence
  Synthetic
cagtcatttgggttggactgaagggagc

SEQ ID NO: 4340 - DNA, 28 bp, Artificial Sequence
  Synthetic
cagtcatttgggttggactgaagggagc

SEQ ID NO: 4341 - DNA, 28 bp, Artificial Sequence
  Synthetic
cagtcatttgggttggactgaagggagc

SEQ ID NO: 4342 - DNA, 28 bp, Artificial Sequence
  Synthetic
cagtcatttgggaagctcaggagggata

SEQ ID NO: 4343 - DNA, 28 bp, Artificial Sequence
  Synthetic
cagtcatttgggaagctcaggagggata

SEQ ID NO: 4344 - DNA, 28 bp, Artificial Sequence
  Synthetic
cagtcatttgggttcgcaggagagatag

SEQ ID NO: 4345 - DNA, 28 bp, Artificial Sequence
  Synthetic
cagtcatttgggtccaaagggatcgcat

SEQ ID NO: 4346 - DNA, 28 bp, Artificial Sequence
  Synthetic
cagtcatttgggtccaaagggatcgcat

SEQ ID NO: 4347 - DNA, 28 bp, Artificial Sequence
  Synthetic
cagtcatttgggttggcattctgtccac

SEQ ID NO: 4348 - DNA, 28 bp, Artificial Sequence
  Synthetic
cagtcatttgggttggcattctgtccac

SEQ ID NO: 4349 - DNA, 28 bp, Artificial Sequence
  Synthetic
cagtcatttgggctgaagtgtttggggg

SEQ ID NO: 4350 - DNA, 28 bp, Artificial Sequence
  Synthetic
cagtcatttgggctgaagtgtttggggg

SEQ ID NO: 4351 - DNA, 28 bp, Artificial Sequence
  Synthetic
cagtcatttgggctgaagtgtttggggg

SEQ ID NO: 4352 - DNA, 28 bp, Artificial Sequence
  Synthetic
cagtcatttgggctgaagtgtttggggg

SEQ ID NO: 4353 - DNA, 28 bp, Artificial Sequence
  Synthetic
cagtcatttgggctgaagtgtttggggg

SEQ ID NO: 4354 - DNA, 28 bp, Artificial Sequence
  Synthetic
cagtcatttgggctgaagtgtttggggg

SEQ ID NO: 4355 - DNA, 28 bp, Artificial Sequence
  Synthetic
cagtcatttgggttccacagctttcttg

SEQ ID NO: 4356 - DNA, 28 bp, Artificial Sequence
  Synthetic
cagtcatttgggttccacagctttcttg

SEQ ID NO: 4357 - DNA, 28 bp, Artificial Sequence
  Synthetic
cagtcatttgggtcattgagtgcagcgt

SEQ ID NO: 4358 - DNA, 28 bp, Artificial Sequence
  Synthetic
cagtcatttgggtcattgagtgcatcgt

SEQ ID NO: 4359 - DNA, 28 bp, Artificial Sequence
  Synthetic
cagtcatttgggtgtgttctcaggtcac

SEQ ID NO: 4360 - DNA, 28 bp, Artificial Sequence
  Synthetic
cagtcatttgggtgtgttctcaggtcac

SEQ ID NO: 4361 - DNA, 28 bp, Artificial Sequence
  Synthetic
cagtcatttgggtgtgttctcaggtcac

SEQ ID NO: 4362 - DNA, 28 bp, Artificial Sequence
  Synthetic
cagtcatttgggtgccaaaggagatttg

SEQ ID NO: 4363 - DNA, 28 bp, Artificial Sequence
  Synthetic
cagtcatttgggtgccaaaggagagttg

SEQ ID NO: 4364 - DNA, 28 bp, Artificial Sequence
  Synthetic
cagtcatttgggtgccaaaggagagttg

SEQ ID NO: 4365 - DNA, 28 bp, Artificial Sequence
  Synthetic
cagtcatttgggtgccaaaggagatttg

SEQ ID NO: 4366 - DNA, 28 bp, Artificial Sequence
  Synthetic
cagtcatttgggtgccaaaggagatttg

SEQ ID NO: 4367 - DNA, 28 bp, Artificial Sequence
  Synthetic
cagtcatttgggtgccaaaggagatttg

SEQ ID NO: 4368 - DNA, 28 bp, Artificial Sequence
  Synthetic
cagtcatttgggtatgagagtattataa

SEQ ID NO: 4369 - DNA, 28 bp, Artificial Sequence
  Synthetic
cagtcatttgggcgaaactggtgtcgac

SEQ ID NO: 4370 - DNA, 28 bp, Artificial Sequence
  Synthetic
cagtcatttgggttcgaggcctattaaa

SEQ ID NO: 4371 - DNA, 28 bp, Artificial Sequence
  Synthetic
cagtcatttgggttagattcacgcacaa

SEQ ID NO: 4372 - DNA, 28 bp, Artificial Sequence
  Synthetic
cagtcatttgggattaacgctggcggtt

SEQ ID NO: 4373 - DNA, 28 bp, Artificial Sequence
  Synthetic
cagtcatttgggatgagttgggtctaac

SEQ ID NO: 4374 - DNA, 28 bp, Artificial Sequence
  Synthetic
cagtcatttgggatgagttgggtctaac

SEQ ID NO: 4375 - DNA, 28 bp, Artificial Sequence
  Synthetic
cagtcatttgggatgagttgggtctaac

SEQ ID NO: 4376 - DNA, 28 bp, Artificial Sequence
  Synthetic
cagtcatttgggtagaatgctattgtaa

SEQ ID NO: 4377 - DNA, 28 bp, Artificial Sequence
  Synthetic
cagtcatttgggtttaaatcatatactt

SEQ ID NO: 4378 - DNA, 28 bp, Artificial Sequence
  Synthetic
cagtcatttgggatgcactgcctcttcc

SEQ ID NO: 4379 - DNA, 28 bp, Artificial Sequence
  Synthetic
cagtcatttgggatagtttctcttgttc

SEQ ID NO: 4380 - DNA, 28 bp, Artificial Sequence
  Synthetic
cagtcatttgggtcatcttcatcatcat

SEQ ID NO: 4381 - DNA, 28 bp, Artificial Sequence
  Synthetic
cagtcatttgggaacagagcagaaacag

SEQ ID NO: 4382 - DNA, 28 bp, Artificial Sequence
  Synthetic
cagtcatttgggggttcgtacgtacact

SEQ ID NO: 4383 - DNA, 28 bp, Artificial Sequence
  Synthetic
cagtcatttggggaaggtagtgaatttg

SEQ ID NO: 4384 - DNA, 28 bp, Artificial Sequence
  Synthetic
cagtcatttgggtaatgtgatgatgaac

SEQ ID NO: 4385 - DNA, 28 bp, Artificial Sequence
  Synthetic
cagtcatttgggttatgaatgctgagga

SEQ ID NO: 4386 - DNA, 28 bp, Artificial Sequence
  Synthetic
cagtcatttgggtaaactaatcacggaa

SEQ ID NO: 4387 - DNA, 28 bp, Artificial Sequence
  Synthetic
cagtcatttgggttttggaaatttgtcc

SEQ ID NO: 4388 - DNA, 28 bp, Artificial Sequence
  Synthetic
cagtcatttgggttggggacgagatgtt

SEQ ID NO: 4389 - DNA, 28 bp, Artificial Sequence
  Synthetic
cagtcatttgggttggggacgagatgtt

SEQ ID NO: 4390 - DNA, 28 bp, Artificial Sequence
  Synthetic
cagtcatttgggttggggacgacatctt

SEQ ID NO: 4391 - DNA, 28 bp, Artificial Sequence
  Synthetic
cagtcatttgggtgagcctctgtggtag

SEQ ID NO: 4392 - DNA, 28 bp, Artificial Sequence
  Synthetic
cagtcatttgggtttttcctactccgcc

SEQ ID NO: 4393 - DNA, 28 bp, Artificial Sequence
  Synthetic
cagtcatttgggtttgcttccagctttt

SEQ ID NO: 4394 - DNA, 28 bp, Artificial Sequence
  Synthetic
cagtcatttgggttggttacccatatgg

SEQ ID NO: 4395 - DNA, 28 bp, Artificial Sequence
  Synthetic
cagtcatttgggttcgatgtctagcagt

SEQ ID NO: 4396 - DNA, 28 bp, Artificial Sequence
  Synthetic
cagtcatttgggtctaagtcttctattg

SEQ ID NO: 4397 - DNA, 28 bp, Artificial Sequence
  Synthetic
cagtcatttgggtacgcattgagtttcg

SEQ ID NO: 4398 - DNA, 28 bp, Artificial Sequence
  Synthetic
cagtcatttgggtggcttggtttatgta

SEQ ID NO: 4399 - DNA, 28 bp, Artificial Sequence
  Synthetic
cagtcatttgggttctgctatgttgctg

SEQ ID NO: 4400 - DNA, 28 bp, Artificial Sequence
  Synthetic
cagtcatttgggtttcttcgtgaatatc

SEQ ID NO: 4401 - DNA, 28 bp, Artificial Sequence
  Synthetic
cagtcatttgggttagagttttctggat

SEQ ID NO: 4402 - DNA, 28 bp, Artificial Sequence
  Synthetic
cagtcatttgggacaaacaccttggatg

SEQ ID NO: 4403 - DNA, 28 bp, Artificial Sequence
  Synthetic
cagtcatttgggaagctttgctcgttca

SEQ ID NO: 4404 - DNA, 28 bp, Artificial Sequence
  Synthetic
cagtcatttgggtgaggtagtaggttgt

SEQ ID NO: 4405 - DNA, 28 bp, Artificial Sequence
  Synthetic
cagtcatttgggtggaatgtaaagaagt

SEQ ID NO: 4406 - DNA, 28 bp, Artificial Sequence
  Synthetic
cagtcatttgggaccctgtagatccgaa

SEQ ID NO: 4407 - DNA, 28 bp, Artificial Sequence
  Synthetic
cagtcatttgggtaaggcacgcggtgaa

SEQ ID NO: 4408 - DNA, 28 bp, Artificial Sequence
  Synthetic
cagtcatttgggtcagtctttttctctc

SEQ ID NO: 4409 - DNA, 28 bp, Artificial Sequence
  Synthetic
cagtcatttgggaatggcactggaagaa

SEQ ID NO: 4410 - DNA, 28 bp, Artificial Sequence
  Synthetic
cagtcatttgggcttggcactgggagaa

SEQ ID NO: 4411 - DNA, 28 bp, Artificial Sequence
  Synthetic
cagtcatttgggtcaggtacctgaagta

SEQ ID NO: 4412 - DNA, 28 bp, Artificial Sequence
  Synthetic
cagtcatttgggagcgaggtatagagtt

SEQ ID NO: 4413 - DNA, 28 bp, Artificial Sequence
  Synthetic
cagtcatttgggtaaatgcactatctgg

SEQ ID NO: 4414 - DNA, 28 bp, Artificial Sequence
  Synthetic
cagtcatttgggtgactagatccacact

SEQ ID NO: 4415 - DNA, 28 bp, Artificial Sequence
  Synthetic
cagtcatttgggacctagcctctccttg

SEQ ID NO: 4416 - DNA, 28 bp, Artificial Sequence
  Synthetic
cagtcatttgggtaaatatcagctggta

SEQ ID NO: 4417 - DNA, 28 bp, Artificial Sequence
  Synthetic
cagtcatttgggattgtacttcatcagg

SEQ ID NO: 4418 - DNA, 28 bp, Artificial Sequence
  Synthetic
cagtcatttgggtcacaacctccttgag

SEQ ID NO: 4419 - DNA, 28 bp, Artificial Sequence
  Synthetic
cagtcatttgggggcaagaagtcggcat

SEQ ID NO: 4420 - DNA, 28 bp, Artificial Sequence
  Synthetic
cagtcatttgggtggcagtgtggttagc

SEQ ID NO: 4421 - DNA, 28 bp, Artificial Sequence
  Synthetic
cagtcatttgggtggaagactagtgatt

SEQ ID NO: 4422 - DNA, 28 bp, Artificial Sequence
  Synthetic
cagtcatttgggtgaaagacatgggtag

SEQ ID NO: 4423 - DNA, 28 bp, Artificial Sequence
  Synthetic
cagtcatttgggtaatactgtcaggtaa

SEQ ID NO: 4424 - DNA, 28 bp, Artificial Sequence
  Synthetic
cagtcatttgggtctttggttatctagc

SEQ ID NO: 4425 - DNA, 28 bp, Artificial Sequence
  Synthetic
cagtcatttgggtgaggtagtaggttgt

SEQ ID NO: 4426 - DNA, 28 bp, Artificial Sequence
  Synthetic
cagtcatttgggagaggtagtaggttgc

SEQ ID NO: 4427 - DNA, 28 bp, Artificial Sequence
  Synthetic
cagtcatttgggtgaggtagtagattgt

SEQ ID NO: 4428 - DNA, 28 bp, Artificial Sequence
  Synthetic
cagtcatttgggtgaggtagtagtttgt

SEQ ID NO: 4429 - DNA, 28 bp, Artificial Sequence
  Synthetic
cagtcatttgggtgaggtagtagtttgt

SEQ ID NO: 4430 - DNA, 28 bp, Artificial Sequence
  Synthetic
cagtcatttgggtacagtactgtgataa

SEQ ID NO: 4431 - DNA, 28 bp, Artificial Sequence
  Synthetic
cagtcatttgggagcagcattgtacagg

SEQ ID NO: 4432 - DNA, 28 bp, Artificial Sequence
  Synthetic
cagtcatttgggaaaagtgcttacagtg

SEQ ID NO: 4433 - DNA, 28 bp, Artificial Sequence
  Synthetic
cagtcatttgggagcagcattgtacagg

SEQ ID NO: 4434 - DNA, 28 bp, Artificial Sequence
  Synthetic
cagtcatttgggtaccctgtagatccga

SEQ ID NO: 4435 - DNA, 28 bp, Artificial Sequence
  Synthetic
cagtcatttgggtaccctgtagaaccga

SEQ ID NO: 4436 - DNA, 28 bp, Artificial Sequence
  Synthetic
cagtcatttgggtggagtgtgacaatgg

SEQ ID NO: 4437 - DNA, 28 bp, Artificial Sequence
  Synthetic
cagtcatttgggttaaggcacgcggtga

SEQ ID NO: 4438 - DNA, 28 bp, Artificial Sequence
  Synthetic
cagtcatttgggtccctgagacccttta

SEQ ID NO: 4439 - DNA, 28 bp, Artificial Sequence
  Synthetic
cagtcatttgggtccctgagaccctaac

SEQ ID NO: 4440 - DNA, 28 bp, Artificial Sequence
  Synthetic
cagtcatttgggcgtaccgtgagtaata

SEQ ID NO: 4441 - DNA, 28 bp, Artificial Sequence
  Synthetic
cagtcatttgggtcggatccgtctgagc

SEQ ID NO: 4442 - DNA, 28 bp, Artificial Sequence
  Synthetic
cagtcatttgggtcacagtgaaccggtc

SEQ ID NO: 4443 - DNA, 28 bp, Artificial Sequence
  Synthetic
cagtcatttgggtaacagtctacagcca

SEQ ID NO: 4444 - DNA, 28 bp, Artificial Sequence
  Synthetic
cagtcatttgggagctggtgttgtgaat

SEQ ID NO: 4445 - DNA, 28 bp, Artificial Sequence
  Synthetic
cagtcatttgggtctacagtgcacgtgt

SEQ ID NO: 4446 - DNA, 28 bp, Artificial Sequence
  Synthetic
cagtcatttgggtaccacagggtagaac

SEQ ID NO: 4447 - DNA, 28 bp, Artificial Sequence
  Synthetic
cagtcatttgggcataaagtagaaagca

SEQ ID NO: 4448 - DNA, 28 bp, Artificial Sequence
  Synthetic
cagtcatttgggagtgtttcctacttta

SEQ ID NO: 4449 - DNA, 28 bp, Artificial Sequence
  Synthetic
cagtcatttggggtccagttttcccagg

SEQ ID NO: 4450 - DNA, 28 bp, Artificial Sequence
  Synthetic
cagtcatttgggtcagtgcactacagaa

SEQ ID NO: 4451 - DNA, 28 bp, Artificial Sequence
  Synthetic
cagtcatttgggtcagtgcatcacagaa

SEQ ID NO: 4452 - DNA, 28 bp, Artificial Sequence
  Synthetic
cagtcatttgggtctcccaacccttgta

SEQ ID NO: 4453 - DNA, 28 bp, Artificial Sequence
  Synthetic
cagtcatttgggctagactgaagctcct

SEQ ID NO: 4454 - DNA, 28 bp, Artificial Sequence
  Synthetic
cagtcatttgggtcgaggagctcacagt

SEQ ID NO: 4455 - DNA, 28 bp, Artificial Sequence
  Synthetic
cagtcatttgggtagcagcacatcatgg

SEQ ID NO: 4456 - DNA, 28 bp, Artificial Sequence
  Synthetic
cagtcatttgggtagcagcacgtaaata

SEQ ID NO: 4457 - DNA, 28 bp, Artificial Sequence
  Synthetic
cagtcatttgggactgcagtgaaggcac

SEQ ID NO: 4458 - DNA, 28 bp, Artificial Sequence
  Synthetic
cagtcatttgggcaaagtgcttacagtg

SEQ ID NO: 4459 - DNA, 28 bp, Artificial Sequence
  Synthetic
cagtcatttgggaacattcaacgctgtc

SEQ ID NO: 4460 - DNA, 28 bp, Artificial Sequence
  Synthetic
cagtcatttgggaacattcattgctgtc

SEQ ID NO: 4461 - DNA, 28 bp, Artificial Sequence
  Synthetic
cagtcatttgggaacattcaacctgtcg

SEQ ID NO: 4462 - DNA, 28 bp, Artificial Sequence
  Synthetic
cagtcatttgggcaaagaattctccttt

SEQ ID NO: 4463 - DNA, 28 bp, Artificial Sequence
  Synthetic
cagtcatttgggtaaggtgcatctagtg

SEQ ID NO: 4464 - DNA, 28 bp, Artificial Sequence
  Synthetic
cagtcatttgggtaaggtgcatctagtg

SEQ ID NO: 4465 - DNA, 28 bp, Artificial Sequence
  Synthetic
cagtcatttgggcaacggaatcccaaaa

SEQ ID NO: 4466 - DNA, 28 bp, Artificial Sequence
  Synthetic
cagtcatttgggctgacctatgaattga

SEQ ID NO: 4467 - DNA, 28 bp, Artificial Sequence
  Synthetic
cagtcatttgggaactggcctacaaagt

SEQ ID NO: 4468 - DNA, 28 bp, Artificial Sequence
  Synthetic
cagtcatttgggtgggtctttgcgggcg

SEQ ID NO: 4469 - DNA, 28 bp, Artificial Sequence
  Synthetic
cagtcatttgggcccagtgttcagacta

SEQ ID NO: 4470 - DNA, 28 bp, Artificial Sequence
  Synthetic
cagtcatttgggacagtagtctgcacat

SEQ ID NO: 4471 - DNA, 28 bp, Artificial Sequence
  Synthetic
cagtcatttgggcccagtgtttagacta

SEQ ID NO: 4472 - DNA, 28 bp, Artificial Sequence
  Synthetic
cagtcatttgggtaacactgtctggtaa

SEQ ID NO: 4473 - DNA, 28 bp, Artificial Sequence
  Synthetic
cagtcatttgggtaatactgcctggtaa

SEQ ID NO: 4474 - DNA, 28 bp, Artificial Sequence
  Synthetic
cagtcatttgggtaatactgccgggtaa

SEQ ID NO: 4475 - DNA, 28 bp, Artificial Sequence
  Synthetic
cagtcatttgggtccttcattccaccgg

SEQ ID NO: 4476 - DNA, 28 bp, Artificial Sequence
  Synthetic
cagtcatttgggtaaagtgcttatagtg

SEQ ID NO: 4477 - DNA, 28 bp, Artificial Sequence
  Synthetic
cagtcatttgggcaaagtgctcacagtg

SEQ ID NO: 4478 - DNA, 28 bp, Artificial Sequence
  Synthetic
cagtcatttgggtagcttatcagactga

SEQ ID NO: 4479 - DNA, 28 bp, Artificial Sequence
  Synthetic
cagtcatttgggaacagcagtcgatggg

SEQ ID NO: 4480 - DNA, 28 bp, Artificial Sequence
  Synthetic
cagtcatttgggactgtgcgtgtgacag

SEQ ID NO: 4481 - DNA, 28 bp, Artificial Sequence
  Synthetic
cagtcatttggggtacagcaggcacaga

SEQ ID NO: 4482 - DNA, 28 bp, Artificial Sequence
  Synthetic
cagtcatttgggatgacctatgaattga

SEQ ID NO: 4483 - DNA, 28 bp, Artificial Sequence
  Synthetic
cagtcatttgggttgtgcttgatctaac

SEQ ID NO: 4484 - DNA, 28 bp, Artificial Sequence
  Synthetic
cagtcatttgggagttcttcagtggcaa

SEQ ID NO: 4485 - DNA, 28 bp, Artificial Sequence
  Synthetic
cagtcatttgggagctacattgtctgct

SEQ ID NO: 4486 - DNA, 28 bp, Artificial Sequence
  Synthetic
cagtcatttgggagctacatctggctac

SEQ ID NO: 4487 - DNA, 28 bp, Artificial Sequence
  Synthetic
cagtcatttgggatcacattgccaggga

SEQ ID NO: 4488 - DNA, 28 bp, Artificial Sequence
  Synthetic
cagtcatttgggatcacattgccaggga

SEQ ID NO: 4489 - DNA, 28 bp, Artificial Sequence
  Synthetic
cagtcatttgggtggctcagttcagcag

SEQ ID NO: 4490 - DNA, 28 bp, Artificial Sequence
  Synthetic
cagtcatttgggcattgcacttgtctcg

SEQ ID NO: 4491 - DNA, 28 bp, Artificial Sequence
  Synthetic
cagtcatttgggttcaagtaatccagga

SEQ ID NO: 4492 - DNA, 28 bp, Artificial Sequence
  Synthetic
cagtcatttgggttcaagtaattcagga

SEQ ID NO: 4493 - DNA, 28 bp, Artificial Sequence
  Synthetic
cagtcatttgggttcacagtggctaagt

SEQ ID NO: 4494 - DNA, 28 bp, Artificial Sequence
  Synthetic
cagtcatttgggttcacagtggctaagt

SEQ ID NO: 4495 - DNA, 28 bp, Artificial Sequence
  Synthetic
cagtcatttgggctagcaccatctgaaa

SEQ ID NO: 4496 - DNA, 28 bp, Artificial Sequence
  Synthetic
cagtcatttgggtagcaccatttgaaat

SEQ ID NO: 4497 - DNA, 28 bp, Artificial Sequence
  Synthetic
cagtcatttgggtagcaccatttgaaat

SEQ ID NO: 4498 - DNA, 28 bp, Artificial Sequence
  Synthetic
cagtcatttgggtgtaaacatcctcgac

SEQ ID NO: 4499 - DNA, 28 bp, Artificial Sequence
  Synthetic
cagtcatttgggtgtaaacatcctacac

SEQ ID NO: 4500 - DNA, 28 bp, Artificial Sequence
  Synthetic
cagtcatttgggtgtaaacatcctacac

SEQ ID NO: 4501 - DNA, 28 bp, Artificial Sequence
  Synthetic
cagtcatttgggtgtaaacatccccgac

SEQ ID NO: 4502 - DNA, 28 bp, Artificial Sequence
  Synthetic
cagtcatttgggtgtaaacatccttgac

SEQ ID NO: 4503 - DNA, 28 bp, Artificial Sequence
  Synthetic
cagtcatttgggaggcaagatgctggca

SEQ ID NO: 4504 - DNA, 28 bp, Artificial Sequence
  Synthetic
cagtcatttgggaaaagctgggttgaga

SEQ ID NO: 4505 - DNA, 28 bp, Artificial Sequence
  Synthetic
cagtcatttgggtctcacacagaaatcg

SEQ ID NO: 4506 - DNA, 28 bp, Artificial Sequence
  Synthetic
cagtcatttggggctgactcctagtcca

SEQ ID NO: 4507 - DNA, 28 bp, Artificial Sequence
  Synthetic
cagtcatttgggaggcagtgtaattagc

SEQ ID NO: 4508 - DNA, 28 bp, Artificial Sequence
  Synthetic
cagtcatttgggaggcagtgtagttagc

SEQ ID NO: 4509 - DNA, 28 bp, Artificial Sequence
  Synthetic
cagtcatttgggttatcagaatctccag

SEQ ID NO: 4510 - DNA, 28 bp, Artificial Sequence
  Synthetic
cagtcatttgggattgcacggtatccat

SEQ ID NO: 4511 - DNA, 28 bp, Artificial Sequence
  Synthetic
cagtcatttgggaataatacatggttga

SEQ ID NO: 4512 - DNA, 28 bp, Artificial Sequence
  Synthetic
cagtcatttgggatcgaccgtgttatat

SEQ ID NO: 4513 - DNA, 28 bp, Artificial Sequence
  Synthetic
cagtcatttgggtatgtaatgtggtcca

SEQ ID NO: 4514 - DNA, 28 bp, Artificial Sequence
  Synthetic
cagtcatttgggtggttgaccatagaac

SEQ ID NO: 4515 - DNA, 28 bp, Artificial Sequence
  Synthetic
cagtcatttgggaagctcggtctgaggc

SEQ ID NO: 4516 - DNA, 28 bp, Artificial Sequence
  Synthetic
cagtcatttgggatcgggaatgtcgtgt

SEQ ID NO: 4517 - DNA, 28 bp, Artificial Sequence
  Synthetic
cagtcatttgggatgacacgatcactcc

SEQ ID NO: 4518 - DNA, 28 bp, Artificial Sequence
  Synthetic
cagtcatttgggttttgcgatgtgttcc

SEQ ID NO: 4519 - DNA, 28 bp, Artificial Sequence
  Synthetic
cagtcatttgggtatgtgcctttggact

SEQ ID NO: 4520 - DNA, 28 bp, Artificial Sequence
  Synthetic
cagtcatttggggcagtccatgggcata

SEQ ID NO: 4521 - DNA, 28 bp, Artificial Sequence
  Synthetic
cagtcatttgggtcaggctcagtcccct

SEQ ID NO: 4522 - DNA, 28 bp, Artificial Sequence
  Synthetic
cagtcatttgggaatcatacagggacat

SEQ ID NO: 4523 - DNA, 28 bp, Artificial Sequence
  Synthetic
cagtcatttgggaatcgtacagggtcat

SEQ ID NO: 4524 - DNA, 28 bp, Artificial Sequence
  Synthetic
cagtcatttgggttaagacttgcagtga

SEQ ID NO: 4525 - DNA, 28 bp, Artificial Sequence
  Synthetic
cagtcatttgggcatgccttgagtgtag

SEQ ID NO: 4526 - DNA, 28 bp, Artificial Sequence
  Synthetic
cagtcatttgggtcagtaaatgtttatt

SEQ ID NO: 4527 - DNA, 28 bp, Artificial Sequence
  Synthetic
cagtcatttgggatcaacaaacatttat

SEQ ID NO: 4528 - DNA, 28 bp, Artificial Sequence
  Synthetic
cagtcatttgggtggaagactagtgatt

SEQ ID NO: 4529 - DNA, 28 bp, Artificial Sequence
  Synthetic
cagtcatttgggtattgcacttgtcccg

SEQ ID NO: 4530 - DNA, 28 bp, Artificial Sequence
  Synthetic
cagtcatttgggcaaagtgctgttcgtg

SEQ ID NO: 4531 - DNA, 28 bp, Artificial Sequence
  Synthetic
cagtcatttgggtgaggtagtaagttgt

SEQ ID NO: 4532 - DNA, 28 bp, Artificial Sequence
  Synthetic
cagtcatttgggaacccgtagatccgat

SEQ ID NO: 4533 - DNA, 28 bp, Artificial Sequence
  Synthetic
cagtcatttgggtgaggtagtaggttgt

SEQ ID NO: 4534 - DNA, 28 bp, Artificial Sequence
  Synthetic
cagtcatttgggtccctgagacctcaag

SEQ ID NO: 4535 - DNA, 28 bp, Artificial Sequence
  Synthetic
cagtcatttgggttttgtatgagacgca

SEQ ID NO: 4536 - DNA, 28 bp, Artificial Sequence
  Synthetic
cagtcatttgggtggaatgtaaagaagt

SEQ ID NO: 4537 - DNA, 28 bp, Artificial Sequence
  Synthetic
cagtcatttgggtaaggcacgcggtgaa

SEQ ID NO: 4538 - DNA, 28 bp, Artificial Sequence
  Synthetic
cagtcatttgggaatggcactgcatgaa

SEQ ID NO: 4539 - DNA, 28 bp, Artificial Sequence
  Synthetic
cagtcatttggggtattagttgtgcgac

SEQ ID NO: 4540 - DNA, 28 bp, Artificial Sequence
  Synthetic
cagtcatttgggtaagctcgtgaacaac

SEQ ID NO: 4541 - DNA, 28 bp, Artificial Sequence
  Synthetic
cagtcatttgggtaaatgcatcttaact

SEQ ID NO: 4542 - DNA, 28 bp, Artificial Sequence
  Synthetic
cagtcatttgggttgagcaatgcgcatg

SEQ ID NO: 4543 - DNA, 28 bp, Artificial Sequence
  Synthetic
cagtcatttgggttattgctcgagaata

SEQ ID NO: 4544 - DNA, 28 bp, Artificial Sequence
  Synthetic
cagtcatttgggtaatactgtcaggtaa

SEQ ID NO: 4545 - DNA, 28 bp, Artificial Sequence
  Synthetic
cagtcatttgggtttgtactacaattag

SEQ ID NO: 4546 - DNA, 28 bp, Artificial Sequence
  Synthetic
cagtcatttgggttgtactgcacaaaag

SEQ ID NO: 4547 - DNA, 28 bp, Artificial Sequence
  Synthetic
cagtcatttgggtactggcctccaaatt

SEQ ID NO: 4548 - DNA, 28 bp, Artificial Sequence
  Synthetic
cagtcatttgggtgaggtaggtgtgaga

SEQ ID NO: 4549 - DNA, 28 bp, Artificial Sequence
  Synthetic
cagtcatttgggtctttggttgtacaaa

SEQ ID NO: 4550 - DNA, 28 bp, Artificial Sequence
  Synthetic
cagtcatttgggattggtcccctccaag

SEQ ID NO: 4551 - DNA, 28 bp, Artificial Sequence
  Synthetic
cagtcatttgggttacatgtattgggta

SEQ ID NO: 4552 - DNA, 28 bp, Artificial Sequence
  Synthetic
cagtcatttgggtacacgtgctcggata

SEQ ID NO: 4553 - DNA, 28 bp, Artificial Sequence
  Synthetic
cagtcatttgggtcacaggatttttgag

SEQ ID NO: 4554 - DNA, 28 bp, Artificial Sequence
  Synthetic
cagtcatttgggtcacagtcaactgttg

SEQ ID NO: 4555 - DNA, 28 bp, Artificial Sequence
  Synthetic
cagtcatttgggttaagtagtggtgccg

SEQ ID NO: 4556 - DNA, 28 bp, Artificial Sequence
  Synthetic
cagtcatttgggtaagtagtagtgccgc

SEQ ID NO: 4557 - DNA, 28 bp, Artificial Sequence
  Synthetic
cagtcatttgggcacacctcactaacac

SEQ ID NO: 4558 - DNA, 28 bp, Artificial Sequence
  Synthetic
cagtcatttgggtgcaaatcttttgcaa

SEQ ID NO: 4559 - DNA, 28 bp, Artificial Sequence
  Synthetic
cagtcatttgggaaatctcatcctaatc

SEQ ID NO: 4560 - DNA, 28 bp, Artificial Sequence
  Synthetic
cagtcatttgggggcaagaattagaagc

SEQ ID NO: 4561 - DNA, 28 bp, Artificial Sequence
  Synthetic
cagtcatttgggaggcagtgtggttagc

SEQ ID NO: 4562 - DNA, 28 bp, Artificial Sequence
  Synthetic
cagtcatttgggtcaccgggtgaaaact

SEQ ID NO: 4563 - DNA, 28 bp, Artificial Sequence
  Synthetic
cagtcatttgggcaagtatcatgtgttg

SEQ ID NO: 4564 - DNA, 28 bp, Artificial Sequence
  Synthetic
cagtcatttgggaccttgtttgttgctg

SEQ ID NO: 4565 - DNA, 28 bp, Artificial Sequence
  Synthetic
cagtcatttgggtttgttttagcctgag

SEQ ID NO: 4566 - DNA, 28 bp, Artificial Sequence
  Synthetic
cagtcatttgggatgagcaacgcgaaca

SEQ ID NO: 4567 - DNA, 28 bp, Artificial Sequence
  Synthetic
cagtcatttgggaaaatgccagtcattg

SEQ ID NO: 4568 - DNA, 28 bp, Artificial Sequence
  Synthetic
cagtcatttgggcaattggtatccttag

SEQ ID NO: 4569 - DNA, 28 bp, Artificial Sequence
  Synthetic
cagtcatttgggtcaccgggtgaaaatt

SEQ ID NO: 4570 - DNA, 28 bp, Artificial Sequence
  Synthetic
cagtcatttgggtgaccgtaatcccgtt

SEQ ID NO: 4571 - DNA, 28 bp, Artificial Sequence
  Synthetic
cagtcatttgggtcaccgggagacaacc

SEQ ID NO: 4572 - DNA, 28 bp, Artificial Sequence
  Synthetic
cagtcatttgggtcaccgggtgaaaaac

SEQ ID NO: 4573 - DNA, 28 bp, Artificial Sequence
  Synthetic
cagtcatttgggtcaccgggtgtcaatc

SEQ ID NO: 4574 - DNA, 28 bp, Artificial Sequence
  Synthetic
cagtcatttgggtcaccgggtgaaaaac

SEQ ID NO: 4575 - DNA, 28 bp, Artificial Sequence
  Synthetic
cagtcatttgggcaccgggttaacatct

SEQ ID NO: 4576 - DNA, 28 bp, Artificial Sequence
  Synthetic
cagtcatttgggtatcacagtttacttg

SEQ ID NO: 4577 - DNA, 28 bp, Artificial Sequence
  Synthetic
cagtcatttgggtgactagagacacatt

SEQ ID NO: 4578 - DNA, 28 bp, Artificial Sequence
  Synthetic
cagtcatttgggtgactagagacacatt

SEQ ID NO: 4579 - DNA, 28 bp, Artificial Sequence
  Synthetic
cagtcatttgggtgtcatggagtcgctc

SEQ ID NO: 4580 - DNA, 28 bp, Artificial Sequence
  Synthetic
cagtcatttgggtgtcatggaggcgctc

SEQ ID NO: 4581 - DNA, 28 bp, Artificial Sequence
  Synthetic
cagtcatttgggtgaggtaggctcagta

SEQ ID NO: 4582 - DNA, 28 bp, Artificial Sequence
  Synthetic
cagtcatttgggaagcaccacgagaagc

SEQ ID NO: 4583 - DNA, 28 bp, Artificial Sequence
  Synthetic
cagtcatttgggtgatatgtctgatatt

SEQ ID NO: 4584 - DNA, 28 bp, Artificial Sequence
  Synthetic
cagtcatttgggtacccgtagctccttg

SEQ ID NO: 4585 - DNA, 28 bp, Artificial Sequence
  Synthetic
cagtcatttgggcacccgtacatatgtt

SEQ ID NO: 4586 - DNA, 28 bp, Artificial Sequence
  Synthetic
cagtcatttgggtacccgtatatttttc

SEQ ID NO: 4587 - DNA, 28 bp, Artificial Sequence
  Synthetic
cagtcatttgggtaccctgtagatcgag

SEQ ID NO: 4588 - DNA, 28 bp, Artificial Sequence
  Synthetic
cagtcatttgggtgagatcgttcagtac

SEQ ID NO: 4589 - DNA, 28 bp, Artificial Sequence
  Synthetic
cagtcatttgggtattatgcacattttc

SEQ ID NO: 4590 - DNA, 28 bp, Artificial Sequence
  Synthetic
cagtcatttgggtgactagaaccttgac

SEQ ID NO: 4591 - DNA, 28 bp, Artificial Sequence
  Synthetic
cagtcatttgggtgatatgtaatctagc

SEQ ID NO: 4592 - DNA, 28 bp, Artificial Sequence
  Synthetic
cagtcatttgggcatgacactgaagcgt

SEQ ID NO: 4593 - DNA, 28 bp, Artificial Sequence
  Synthetic
cagtcatttgggtcacaacctcctagaa

SEQ ID NO: 4594 - DNA, 28 bp, Artificial Sequence
  Synthetic
cagtcatttgggtaatacgtgattggtg

SEQ ID NO: 4595 - DNA, 28 bp, Artificial Sequence
  Synthetic
cagtcatttgggtgaaagacatgggtag

SEQ ID NO: 4596 - DNA, 28 bp, Artificial Sequence
  Synthetic
cagtcatttgggaggcagatgttggcat

SEQ ID NO: 4597 - DNA, 28 bp, Artificial Sequence
  Synthetic
cagtcatttgggtggcaagatgttggca

SEQ ID NO: 4598 - DNA, 28 bp, Artificial Sequence
  Synthetic
cagtcatttgggtggcaagaaatggcag

SEQ ID NO: 4599 - DNA, 28 bp, Artificial Sequence
  Synthetic
cagtcatttgggttaaagctaccaaccg

SEQ ID NO: 4600 - DNA, 28 bp, Artificial Sequence
  Synthetic
cagtcatttgggttcatcaggccatagc

SEQ ID NO: 4601 - DNA, 28 bp, Artificial Sequence
  Synthetic
cagtcatttgggataaagctaggttacc

SEQ ID NO: 4602 - DNA, 28 bp, Artificial Sequence
  Synthetic
cagtcatttgggtgagatcattagttga

SEQ ID NO: 4603 - DNA, 28 bp, Artificial Sequence
  Synthetic
cagtcatttgggtgagatcatcgtgaaa

SEQ ID NO: 4604 - DNA, 28 bp, Artificial Sequence
  Synthetic
cagtcatttgggtgagatcatcgtgaaa

SEQ ID NO: 4605 - DNA, 28 bp, Artificial Sequence
  Synthetic
cagtcatttgggtagcaccatataaatt

SEQ ID NO: 4606 - DNA, 28 bp, Artificial Sequence
  Synthetic
cagtcatttgggtgaggtagtttgcaat

SEQ ID NO: 4607 - DNA, 28 bp, Artificial Sequence
  Synthetic
cagtcatttgggtacaaagtatttgaaa

SEQ ID NO: 4608 - DNA, 28 bp, Artificial Sequence
  Synthetic
cagtcatttgggtaagtgaatgctttgc

SEQ ID NO: 4609 - DNA, 28 bp, Artificial Sequence
  Synthetic
cagtcatttggggtgagcaaagtttcag

SEQ ID NO: 4610 - DNA, 28 bp, Artificial Sequence
  Synthetic
cagtcatttgggtgatatgttgtttgaa

SEQ ID NO: 4611 - DNA, 28 bp, Artificial Sequence
  Synthetic
cagtcatttgggtgaggtagtaggttgt

SEQ ID NO: 4612 - DNA, 28 bp, Artificial Sequence
  Synthetic
cagtcatttgggtccctgagacctcaag

SEQ ID NO: 4613 - DNA, 28 bp, Artificial Sequence
  Synthetic
cagtcatttgggttttgtatgagacgca

SEQ ID NO: 4614 - DNA, 28 bp, Artificial Sequence
  Synthetic
cagtcatttgggtggaatgtaaagaagt

SEQ ID NO: 4615 - DNA, 28 bp, Artificial Sequence
  Synthetic
cagtcatttgggtaaggcacgcggtgaa

SEQ ID NO: 4616 - DNA, 28 bp, Artificial Sequence
  Synthetic
cagtcatttgggtatcacagccagcttt

SEQ ID NO: 4617 - DNA, 28 bp, Artificial Sequence
  Synthetic
cagtcatttgggagctttcgacatgatt

SEQ ID NO: 4618 - DNA, 28 bp, Artificial Sequence
  Synthetic
cagtcatttgggaatggcactgcatgaa

SEQ ID NO: 4619 - DNA, 28 bp, Artificial Sequence
  Synthetic
cagtcatttgggaatgacactggttatc

SEQ ID NO: 4620 - DNA, 28 bp, Artificial Sequence
  Synthetic
cagtcatttggggtattagttgtgcgac

SEQ ID NO: 4621 - DNA, 28 bp, Artificial Sequence
  Synthetic
cagtcatttgggtaagctcgtgatcaac

SEQ ID NO: 4622 - DNA, 28 bp, Artificial Sequence
  Synthetic
cagtcatttgggtaaatgcatcttaact

SEQ ID NO: 4623 - DNA, 28 bp, Artificial Sequence
  Synthetic
cagtcatttgggttgagcaatgcgcatg

SEQ ID NO: 4624 - DNA, 28 bp, Artificial Sequence
  Synthetic
cagtcatttgggttattgctcgagaata

SEQ ID NO: 4625 - DNA, 28 bp, Artificial Sequence
  Synthetic
cagtcatttgggtattgcactctccccg

SEQ ID NO: 4626 - DNA, 28 bp, Artificial Sequence
  Synthetic
cagtcatttgggtaatactgtcaggtaa

SEQ ID NO: 4627 - DNA, 28 bp, Artificial Sequence
  Synthetic
cagtcatttgggtccctgagaattctcg

SEQ ID NO: 4628 - DNA, 28 bp, Artificial Sequence
  Synthetic
cagtcatttgggtttgtactccgatgcc

SEQ ID NO: 4629 - DNA, 28 bp, Artificial Sequence
  Synthetic
cagtcatttgggtttgtactacacatag

SEQ ID NO: 4630 - DNA, 28 bp, Artificial Sequence
  Synthetic
cagtcatttgggttgtactacacaaaag

SEQ ID NO: 4631 - DNA, 28 bp, Artificial Sequence
  Synthetic
cagtcatttgggtactggcccccaaatc

SEQ ID NO: 4632 - DNA, 28 bp, Artificial Sequence
  Synthetic
cagtcatttgggtgaggtaggtgcgaga

SEQ ID NO: 4633 - DNA, 28 bp, Artificial Sequence
  Synthetic
cagtcatttgggttgcgtaggcctttgc

SEQ ID NO: 4634 - DNA, 28 bp, Artificial Sequence
  Synthetic
cagtcatttgggcggtacgatcgcggcg

SEQ ID NO: 4635 - DNA, 28 bp, Artificial Sequence
  Synthetic
cagtcatttgggtctttggttgtacaaa

SEQ ID NO: 4636 - DNA, 28 bp, Artificial Sequence
  Synthetic
cagtcatttgggattggtcccctccaag

SEQ ID NO: 4637 - DNA, 28 bp, Artificial Sequence
  Synthetic
cagtcatttgggttacatgtttcgggta

SEQ ID NO: 4638 - DNA, 28 bp, Artificial Sequence
  Synthetic
cagtcatttgggtgactagagcctattc

SEQ ID NO: 4639 - DNA, 28 bp, Artificial Sequence
  Synthetic
cagtcatttgggtacacgtgcacggata

SEQ ID NO: 4640 - DNA, 28 bp, Artificial Sequence
  Synthetic
cagtcatttgggtcacaggacttttgag

SEQ ID NO: 4641 - DNA, 28 bp, Artificial Sequence
  Synthetic
cagtcatttgggtcacagtcaactgttg

SEQ ID NO: 4642 - DNA, 28 bp, Artificial Sequence
  Synthetic
cagtcatttgggttaagtagtggtgccg

SEQ ID NO: 4643 - DNA, 28 bp, Artificial Sequence
  Synthetic
cagtcatttgggtaagtagtagtgccgc

SEQ ID NO: 4644 - DNA, 28 bp, Artificial Sequence
  Synthetic
cagtcatttgggcacacctcactaacac

SEQ ID NO: 4645 - DNA, 28 bp, Artificial Sequence
  Synthetic
cagtcatttgggtgcaaatctttcgcga

SEQ ID NO: 4646 - DNA, 28 bp, Artificial Sequence
  Synthetic
cagtcatttgggtggaatgcatagaaga

SEQ ID NO: 4647 - DNA, 28 bp, Artificial Sequence
  Synthetic
cagtcatttggggagtatcaggagtacc

SEQ ID NO: 4648 - DNA, 28 bp, Artificial Sequence
  Synthetic
cagtcatttgggggttttgagaggaatc

SEQ ID NO: 4649 - DNA, 28 bp, Artificial Sequence
  Synthetic
cagtcatttgggaaatctcatcctaatc

SEQ ID NO: 4650 - DNA, 28 bp, Artificial Sequence
  Synthetic
cagtcatttggggtgatgtcgaactctt

SEQ ID NO: 4651 - DNA, 28 bp, Artificial Sequence
  Synthetic
cagtcatttgggtagctttttagttttc

SEQ ID NO: 4652 - DNA, 28 bp, Artificial Sequence
  Synthetic
cagtcatttggggtttctcgatgttttc

SEQ ID NO: 4653 - DNA, 28 bp, Artificial Sequence
  Synthetic
cagtcatttgggggcgggtggttgttgt

SEQ ID NO: 4654 - DNA, 28 bp, Artificial Sequence
  Synthetic
cagtcatttgggtgagggaggaagggtg

SEQ ID NO: 4655 - DNA, 28 bp, Artificial Sequence
  Synthetic
cagtcatttgggaggcaagactttggca

SEQ ID NO: 4656 - DNA, 28 bp, Artificial Sequence
  Synthetic
cagtcatttgggcccgtgaagtgtctgc

SEQ ID NO: 4657 - DNA, 28 bp, Artificial Sequence
  Synthetic
cagtcatttgggggcaagaattagaagc

SEQ ID NO: 4658 - DNA, 28 bp, Artificial Sequence
  Synthetic
cagtcatttgggggcaagactctggcaa

SEQ ID NO: 4659 - DNA, 28 bp, Artificial Sequence
  Synthetic
cagtcatttgggggcatgatgtagcagt

SEQ ID NO: 4660 - DNA, 28 bp, Artificial Sequence
  Synthetic
cagtcatttgggtcgccgggtgggaaag

SEQ ID NO: 4661 - DNA, 28 bp, Artificial Sequence
  Synthetic
cagtcatttgggtgtaggcatgggtgtt

SEQ ID NO: 4662 - DNA, 28 bp, Artificial Sequence
  Synthetic
cagtcatttgggtgcccgtactgtgtcg

SEQ ID NO: 4663 - DNA, 28 bp, Artificial Sequence
  Synthetic
cagtcatttgggaggcagtgtggttagc

SEQ ID NO: 4664 - DNA, 28 bp, Artificial Sequence
  Synthetic
cagtcatttgggtcaccgggtggaaact

SEQ ID NO: 4665 - DNA, 28 bp, Artificial Sequence
  Synthetic
cagtcatttgggcaattgccatgtgttg

SEQ ID NO: 4666 - DNA, 28 bp, Artificial Sequence
  Synthetic
cagtcatttgggaccttgtttgttgctg

SEQ ID NO: 4667 - DNA, 28 bp, Artificial Sequence
  Synthetic
cagtcatttgggtttgttttagcctgag

SEQ ID NO: 4668 - DNA, 28 bp, Artificial Sequence
  Synthetic
cagtcatttgggttgagcaacgcgaaca

SEQ ID NO: 4669 - DNA, 28 bp, Artificial Sequence
  Synthetic
cagtcatttgggtaaatgccagtcgttg

SEQ ID NO: 4670 - DNA, 28 bp, Artificial Sequence
  Synthetic
cagtcatttgggcaattggtatccctgt

SEQ ID NO: 4671 - DNA, 28 bp, Artificial Sequence
  Synthetic
cagtcatttgggtcactggtctttctct

SEQ ID NO: 4672 - DNA, 28 bp, Artificial Sequence
  Synthetic
cagtcatttgggtcaccgggtgaaaatt

SEQ ID NO: 4673 - DNA, 28 bp, Artificial Sequence
  Synthetic
cagtcatttgggtgaccgtaatcccgtt

SEQ ID NO: 4674 - DNA, 28 bp, Artificial Sequence
  Synthetic
cagtcatttgggtcaccgggtgaacact

SEQ ID NO: 4675 - DNA, 28 bp, Artificial Sequence
  Synthetic
cagtcatttgggtcaccgggagaaaaac

SEQ ID NO: 4676 - DNA, 28 bp, Artificial Sequence
  Synthetic
cagtcatttgggtcaccgggtgtaaatc

SEQ ID NO: 4677 - DNA, 28 bp, Artificial Sequence
  Synthetic
cagtcatttgggtatcatcgatcacgtg

SEQ ID NO: 4678 - DNA, 28 bp, Artificial Sequence
  Synthetic
cagtcatttgggtcaccgggtgtacatc

SEQ ID NO: 4679 - DNA, 28 bp, Artificial Sequence
  Synthetic
cagtcatttgggtcaccgggtgaaaaat

SEQ ID NO: 4680 - DNA, 28 bp, Artificial Sequence
  Synthetic
cagtcatttgggcaccgggttaacatct

SEQ ID NO: 4681 - DNA, 28 bp, Artificial Sequence
  Synthetic
cagtcatttgggtatcacagtttacttg

SEQ ID NO: 4682 - DNA, 28 bp, Artificial Sequence
  Synthetic
cagtcatttgggtgactagagacacatt

SEQ ID NO: 4683 - DNA, 28 bp, Artificial Sequence
  Synthetic
cagtcatttgggtgactagagacacatt

SEQ ID NO: 4684 - DNA, 28 bp, Artificial Sequence
  Synthetic
cagtcatttgggtgtcatggagtcgctc

SEQ ID NO: 4685 - DNA, 28 bp, Artificial Sequence
  Synthetic
cagtcatttgggtgtcatggaggcgctc

SEQ ID NO: 4686 - DNA, 28 bp, Artificial Sequence
  Synthetic
cagtcatttgggtgaggtaggctcagta

SEQ ID NO: 4687 - DNA, 28 bp, Artificial Sequence
  Synthetic
cagtcatttgggaagcaccacgagaagc

SEQ ID NO: 4688 - DNA, 28 bp, Artificial Sequence
  Synthetic
cagtcatttgggtgatatgtctggtatt

SEQ ID NO: 4689 - DNA, 28 bp, Artificial Sequence
  Synthetic
cagtcatttgggtacccgtagctcctat

SEQ ID NO: 4690 - DNA, 28 bp, Artificial Sequence
  Synthetic
cagtcatttgggcacccgtacatatgtt

SEQ ID NO: 4691 - DNA, 28 bp, Artificial Sequence
  Synthetic
cagtcatttgggcacccgtacatttgtt

SEQ ID NO: 4692 - DNA, 28 bp, Artificial Sequence
  Synthetic
cagtcatttgggtacccgtaatcttcat

SEQ ID NO: 4693 - DNA, 28 bp, Artificial Sequence
  Synthetic
cagtcatttgggtacccgtataagtttc

SEQ ID NO: 4694 - DNA, 28 bp, Artificial Sequence
  Synthetic
cagtcatttgggtacccgtaatgtttcc

SEQ ID NO: 4695 - DNA, 28 bp, Artificial Sequence
  Synthetic
cagtcatttgggtggcggatccattttg

SEQ ID NO: 4696 - DNA, 28 bp, Artificial Sequence
  Synthetic
cagtcatttgggtaccctgtagatcgag

SEQ ID NO: 4697 - DNA, 28 bp, Artificial Sequence
  Synthetic
cagtcatttgggtgagatcgttcagtac

SEQ ID NO: 4698 - DNA, 28 bp, Artificial Sequence
  Synthetic
cagtcatttgggtcgaatcgtttatcag

SEQ ID NO: 4699 - DNA, 28 bp, Artificial Sequence
  Synthetic
cagtcatttgggtattatgcacattttc

SEQ ID NO: 4700 - DNA, 28 bp, Artificial Sequence
  Synthetic
cagtcatttgggtgactagaaccgttac

SEQ ID NO: 4701 - DNA, 28 bp, Artificial Sequence
  Synthetic
cagtcatttgggtgatatgtaatctagc

SEQ ID NO: 4702 - DNA, 28 bp, Artificial Sequence
  Synthetic
cagtcatttgggtatgacactgaagcga

SEQ ID NO: 4703 - DNA, 28 bp, Artificial Sequence
  Synthetic
cagtcatttgggtatgacactgaagcgt

SEQ ID NO: 4704 - DNA, 28 bp, Artificial Sequence
  Synthetic
cagtcatttgggtatgacactgaagcgt

SEQ ID NO: 4705 - DNA, 28 bp, Artificial Sequence
  Synthetic
cagtcatttgggcatgacactgattagg

SEQ ID NO: 4706 - DNA, 28 bp, Artificial Sequence
  Synthetic
cagtcatttgggtcacaacctcctagaa

SEQ ID NO: 4707 - DNA, 28 bp, Artificial Sequence
  Synthetic
cagtcatttgggtaatacgtcgttggtg

SEQ ID NO: 4708 - DNA, 28 bp, Artificial Sequence
  Synthetic
cagtcatttgggtgaaagacatgggtag

SEQ ID NO: 4709 - DNA, 28 bp, Artificial Sequence
  Synthetic
cagtcatttgggaggcaagatgttggca

SEQ ID NO: 4710 - DNA, 28 bp, Artificial Sequence
  Synthetic
cagtcatttgggtggcaagatgtaggca

SEQ ID NO: 4711 - DNA, 28 bp, Artificial Sequence
  Synthetic
cagtcatttgggtggcaagaaatggcag

SEQ ID NO: 4712 - DNA, 28 bp, Artificial Sequence
  Synthetic
cagtcatttgggttaaagctaccaaccg

SEQ ID NO: 4713 - DNA, 28 bp, Artificial Sequence
  Synthetic
cagtcatttgggttcgttgttgatgaag

SEQ ID NO: 4714 - DNA, 28 bp, Artificial Sequence
  Synthetic
cagtcatttgggttcatcaggccatagc

SEQ ID NO: 4715 - DNA, 28 bp, Artificial Sequence
  Synthetic
cagtcatttgggtggaggcctggttgtt

SEQ ID NO: 4716 - DNA, 28 bp, Artificial Sequence
  Synthetic
cagtcatttgggataaagctaggttacc

SEQ ID NO: 4717 - DNA, 28 bp, Artificial Sequence
  Synthetic
cagtcatttgggtgagatcattagttga

SEQ ID NO: 4718 - DNA, 28 bp, Artificial Sequence
  Synthetic
cagtcatttgggtgagatcatcgtgaaa

SEQ ID NO: 4719 - DNA, 28 bp, Artificial Sequence
  Synthetic
cagtcatttgggtgagatcatcgtgaaa

SEQ ID NO: 4720 - DNA, 28 bp, Artificial Sequence
  Synthetic
cagtcatttgggtagcaccatataaatt

SEQ ID NO: 4721 - DNA, 28 bp, Artificial Sequence
  Synthetic
cagtcatttgggtgaggtagtatgtaat

SEQ ID NO: 4722 - DNA, 28 bp, Artificial Sequence
  Synthetic
cagtcatttgggtacaaagtatttgaaa

SEQ ID NO: 4723 - DNA, 28 bp, Artificial Sequence
  Synthetic
cagtcatttgggtaagtgaatgctttgc

SEQ ID NO: 4724 - DNA, 28 bp, Artificial Sequence
  Synthetic
cagtcatttggggtgagcaaagtttcag

SEQ ID NO: 4725 - DNA, 28 bp, Artificial Sequence
  Synthetic
cagtcatttgggtgatatgttgtttgaa

SEQ ID NO: 4726 - DNA, 28 bp, Artificial Sequence
  Synthetic
cagtcatttgggtaatgcccctaaaaat

SEQ ID NO: 4727 - DNA, 28 bp, Artificial Sequence
  Synthetic
cagtcatttgggtaatactgtctggtaa

SEQ ID NO: 4728 - DNA, 28 bp, Artificial Sequence
  Synthetic
cagtcatttgggttgcatatgtaggatg

SEQ ID NO: 4729 - DNA, 28 bp, Artificial Sequence
  Synthetic
cagtcatttgggtggcagtgtattgtta

SEQ ID NO: 4730 - DNA, 28 bp, Artificial Sequence
  Synthetic
cagtcatttgggtttttgcgatgtgttc

SEQ ID NO: 4731 - DNA, 28 bp, Artificial Sequence
  Synthetic
cagtcatttgggtgagatcattttgaaa

SEQ ID NO: 4732 - DNA, 28 bp, Artificial Sequence
  Synthetic
cagtcatttgggtgaggtagtaggttgt

SEQ ID NO: 4733 - DNA, 28 bp, Artificial Sequence
  Synthetic
cagtcatttgggtggaatgtaaagaagt

SEQ ID NO: 4734 - DNA, 28 bp, Artificial Sequence
  Synthetic
cagtcatttgggaccctgtagatccgaa

SEQ ID NO: 4735 - DNA, 28 bp, Artificial Sequence
  Synthetic
cagtcatttgggaacccgtaaatccgaa

SEQ ID NO: 4736 - DNA, 28 bp, Artificial Sequence
  Synthetic
cagtcatttgggcatcacagtctgagtt

SEQ ID NO: 4737 - DNA, 28 bp, Artificial Sequence
  Synthetic
cagtcatttgggtgagtattacatcagg

SEQ ID NO: 4738 - DNA, 28 bp, Artificial Sequence
  Synthetic
cagtcatttgggtaaggcacgcggtgaa

SEQ ID NO: 4739 - DNA, 28 bp, Artificial Sequence
  Synthetic
cagtcatttgggtccctgagaccctaac

SEQ ID NO: 4740 - DNA, 28 bp, Artificial Sequence
  Synthetic
cagtcatttgggttggtccccttcaacc

SEQ ID NO: 4741 - DNA, 28 bp, Artificial Sequence
  Synthetic
cagtcatttgggtatcacagccattttg

SEQ ID NO: 4742 - DNA, 28 bp, Artificial Sequence
  Synthetic
cagtcatttgggtatcacagccattttg

SEQ ID NO: 4743 - DNA, 28 bp, Artificial Sequence
  Synthetic
cagtcatttgggtcagtctttttctctc

SEQ ID NO: 4744 - DNA, 28 bp, Artificial Sequence
  Synthetic
cagtcatttgggtggacggagaactgat

SEQ ID NO: 4745 - DNA, 28 bp, Artificial Sequence
  Synthetic
cagtcatttgggccttatcattctctcg

SEQ ID NO: 4746 - DNA, 28 bp, Artificial Sequence
  Synthetic
cagtcatttgggttgtgcgtgtgacagc

SEQ ID NO: 4747 - DNA, 28 bp, Artificial Sequence
  Synthetic
cagtcatttgggtgattgtccaaacgca

SEQ ID NO: 4748 - DNA, 28 bp, Artificial Sequence
  Synthetic
cagtcatttggggttaatggcactggaa

SEQ ID NO: 4749 - DNA, 28 bp, Artificial Sequence
  Synthetic
cagtcatttgggcttggcactgggagaa

SEQ ID NO: 4750 - DNA, 28 bp, Artificial Sequence
  Synthetic
cagtcatttgggttttgtgaccgacact

SEQ ID NO: 4751 - DNA, 28 bp, Artificial Sequence
  Synthetic
cagtcatttgggtcaggtacctgaagta

SEQ ID NO: 4752 - DNA, 28 bp, Artificial Sequence
  Synthetic
cagtcatttgggcagcgaggtatagagt

SEQ ID NO: 4753 - DNA, 28 bp, Artificial Sequence
  Synthetic
cagtcatttgggtaggaacttcataccg

SEQ ID NO: 4754 - DNA, 28 bp, Artificial Sequence
  Synthetic
cagtcatttgggtaggaacttaataccg

SEQ ID NO: 4755 - DNA, 28 bp, Artificial Sequence
  Synthetic
cagtcatttgggtaaatgcactatctgg

SEQ ID NO: 4756 - DNA, 28 bp, Artificial Sequence
  Synthetic
cagtcatttgggtcggtgggactttcgt

SEQ ID NO: 4757 - DNA, 28 bp, Artificial Sequence
  Synthetic
cagtcatttgggtgactagatccacact

SEQ ID NO: 4758 - DNA, 28 bp, Artificial Sequence
  Synthetic
cagtcatttgggtgtatttacgttgcat

SEQ ID NO: 4759 - DNA, 28 bp, Artificial Sequence
  Synthetic
cagtcatttgggtgtcatggaattgctc

SEQ ID NO: 4760 - DNA, 28 bp, Artificial Sequence
  Synthetic
cagtcatttgggaagagagctgtccgtc

SEQ ID NO: 4761 - DNA, 28 bp, Artificial Sequence
  Synthetic
cagtcatttgggaagagagctatccgtc

SEQ ID NO: 4762 - DNA, 28 bp, Artificial Sequence
  Synthetic
cagtcatttgggaatctagcctctacta

SEQ ID NO: 4763 - DNA, 28 bp, Artificial Sequence
  Synthetic
cagtcatttgggtaaatatcagctggta

SEQ ID NO: 4764 - DNA, 28 bp, Artificial Sequence
  Synthetic
cagtcatttgggtgaagtcagcaacttg

SEQ ID NO: 4765 - DNA, 28 bp, Artificial Sequence
  Synthetic
cagtcatttgggtagcaccattcgaaat

SEQ ID NO: 4766 - DNA, 28 bp, Artificial Sequence
  Synthetic
cagtcatttgggtgactagaccgaacac

SEQ ID NO: 4767 - DNA, 28 bp, Artificial Sequence
  Synthetic
cagtcatttgggtgtgttgaaaatcgtt

SEQ ID NO: 4768 - DNA, 28 bp, Artificial Sequence
  Synthetic
cagtcatttgggtttcatgtcgatttca

SEQ ID NO: 4769 - DNA, 28 bp, Artificial Sequence
  Synthetic
cagtcatttgggtaaatatttaagtgga

SEQ ID NO: 4770 - DNA, 28 bp, Artificial Sequence
  Synthetic
cagtcatttgggtatcacagccagcttt

SEQ ID NO: 4771 - DNA, 28 bp, Artificial Sequence
  Synthetic
cagtcatttgggtatcacagccagcttt

SEQ ID NO: 4772 - DNA, 28 bp, Artificial Sequence
  Synthetic
cagtcatttgggtatcacagccagcttt

SEQ ID NO: 4773 - DNA, 28 bp, Artificial Sequence
  Synthetic
cagtcatttgggtcactgggcaaagtgt

SEQ ID NO: 4774 - DNA, 28 bp, Artificial Sequence
  Synthetic
cagtcatttgggtttaggtttcacagga

SEQ ID NO: 4775 - DNA, 28 bp, Artificial Sequence
  Synthetic
cagtcatttgggtaatctcaatttgtaa

SEQ ID NO: 4776 - DNA, 28 bp, Artificial Sequence
  Synthetic
cagtcatttgggattgtacttcatcagg

SEQ ID NO: 4777 - DNA, 28 bp, Artificial Sequence
  Synthetic
cagtcatttgggtcaggtacttagtgac

SEQ ID NO: 4778 - DNA, 28 bp, Artificial Sequence
  Synthetic
cagtcatttggggggggtcactctgtgc

SEQ ID NO: 4779 - DNA, 28 bp, Artificial Sequence
  Synthetic
cagtcatttgggtcacaacctccttgag

SEQ ID NO: 4780 - DNA, 28 bp, Artificial Sequence
  Synthetic
cagtcatttgggaatcacaggattatac

SEQ ID NO: 4781 - DNA, 28 bp, Artificial Sequence
  Synthetic
cagtcatttggggcactgggtaaagttt

SEQ ID NO: 4782 - DNA, 28 bp, Artificial Sequence
  Synthetic
cagtcatttgggtattgcacacttcccg

SEQ ID NO: 4783 - DNA, 28 bp, Artificial Sequence
  Synthetic
cagtcatttgggtattgcacattcaccg

SEQ ID NO: 4784 - DNA, 28 bp, Artificial Sequence
  Synthetic
cagtcatttgggtattgcacttgagacg

SEQ ID NO: 4785 - DNA, 28 bp, Artificial Sequence
  Synthetic
cagtcatttgggtattgcacttttcaca

SEQ ID NO: 4786 - DNA, 28 bp, Artificial Sequence
  Synthetic
cagtcatttgggtattcgagccaataag

SEQ ID NO: 4787 - DNA, 28 bp, Artificial Sequence
  Synthetic
cagtcatttgggttttgattgttgctca

SEQ ID NO: 4788 - DNA, 28 bp, Artificial Sequence
  Synthetic
cagtcatttgggtgtctttttccgctta

SEQ ID NO: 4789 - DNA, 28 bp, Artificial Sequence
  Synthetic
cagtcatttgggtgaacacagctggtgg

SEQ ID NO: 4790 - DNA, 28 bp, Artificial Sequence
  Synthetic
cagtcatttgggtcactgggctttgttt

SEQ ID NO: 4791 - DNA, 28 bp, Artificial Sequence
  Synthetic
cagtcatttgggtggcaagatgtcggca

SEQ ID NO: 4792 - DNA, 28 bp, Artificial Sequence
  Synthetic
cagtcatttgggtggcaagatgtcggaa

SEQ ID NO: 4793 - DNA, 28 bp, Artificial Sequence
  Synthetic
cagtcatttgggaggtgcattgtagtcg

SEQ ID NO: 4794 - DNA, 28 bp, Artificial Sequence
  Synthetic
cagtcatttgggtggcagtgtggttagc

SEQ ID NO: 4795 - DNA, 28 bp, Artificial Sequence
  Synthetic
cagtcatttgggataaagctagacaacc

SEQ ID NO: 4796 - DNA, 28 bp, Artificial Sequence
  Synthetic
cagtcatttgggaaaggaacgatcgttg

SEQ ID NO: 4797 - DNA, 28 bp, Artificial Sequence
  Synthetic
cagtcatttgggtatcacagtggctgtt

SEQ ID NO: 4798 - DNA, 28 bp, Artificial Sequence
  Synthetic
cagtcatttgggtggaagactagtgatt

SEQ ID NO: 4799 - DNA, 28 bp, Artificial Sequence
  Synthetic
cagtcatttgggtaaagctagattacca

SEQ ID NO: 4800 - DNA, 28 bp, Artificial Sequence
  Synthetic
cagtcatttgggtaatactgtcaggtaa

SEQ ID NO: 4801 - DNA, 28 bp, Artificial Sequence
  Synthetic
cagtcatttgggttgagcaaaatttcag

SEQ ID NO: 4802 - DNA, 28 bp, Artificial Sequence
  Synthetic
cagtcatttgggcattgcacttgtcccg

SEQ ID NO: 4803 - DNA, 28 bp, Artificial Sequence
  Synthetic
cagtcatttgggaattgcactagtcccg

SEQ ID NO: 4804 - DNA, 28 bp, Artificial Sequence
  Synthetic
cagtcatttgggtctttggttatctagc

SEQ ID NO: 4805 - DNA, 28 bp, Artificial Sequence
  Synthetic
cagtcatttgggtctttggtgattttag

SEQ ID NO: 4806 - DNA, 28 bp, Artificial Sequence
  Synthetic
cagtcatttgggtctttggtattctagc

SEQ ID NO: 4807 - DNA, 28 bp, Artificial Sequence
  Synthetic
cagtcatttgggcggtataccttcagta

SEQ ID NO: 4808 - DNA, 28 bp, Artificial Sequence
  Synthetic
cagtcatttgggacgtatactgaatgta

SEQ ID NO: 4809 - DNA, 28 bp, Artificial Sequence
  Synthetic
cagtcatttgggtgagatcattttgaaa

SEQ ID NO: 4810 - DNA, 28 bp, Artificial Sequence
  Synthetic
cagtcatttgggtgaggtagtaggttgt

SEQ ID NO: 4811 - DNA, 28 bp, Artificial Sequence
  Synthetic
cagtcatttgggtggaatgtaaagaagt

SEQ ID NO: 4812 - DNA, 28 bp, Artificial Sequence
  Synthetic
cagtcatttgggaccctgtagatccgaa

SEQ ID NO: 4813 - DNA, 28 bp, Artificial Sequence
  Synthetic
cagtcatttgggaacccgtaattccgaa

SEQ ID NO: 4814 - DNA, 28 bp, Artificial Sequence
  Synthetic
cagtcatttgggcatcacagtctgagtt

SEQ ID NO: 4815 - DNA, 28 bp, Artificial Sequence
  Synthetic
cagtcatttgggtgagtattacatcagg

SEQ ID NO: 4816 - DNA, 28 bp, Artificial Sequence
  Synthetic
cagtcatttgggtaaggcacgcggtgaa

SEQ ID NO: 4817 - DNA, 28 bp, Artificial Sequence
  Synthetic
cagtcatttgggtccctgagaccctaac

SEQ ID NO: 4818 - DNA, 28 bp, Artificial Sequence
  Synthetic
cagtcatttgggttggtccccttcaacc

SEQ ID NO: 4819 - DNA, 28 bp, Artificial Sequence
  Synthetic
cagtcatttgggtatcacagccattttg

SEQ ID NO: 4820 - DNA, 28 bp, Artificial Sequence
  Synthetic
cagtcatttgggtatcacagccattttg

SEQ ID NO: 4821 - DNA, 28 bp, Artificial Sequence
  Synthetic
cagtcatttgggtcagtctttttctctc

SEQ ID NO: 4822 - DNA, 28 bp, Artificial Sequence
  Synthetic
cagtcatttgggtggacggagaactgat

SEQ ID NO: 4823 - DNA, 28 bp, Artificial Sequence
  Synthetic
cagtcatttgggttgtgcgtgtgacagc

SEQ ID NO: 4824 - DNA, 28 bp, Artificial Sequence
  Synthetic
cagtcatttgggtgattgtccaaacgca

SEQ ID NO: 4825 - DNA, 28 bp, Artificial Sequence
  Synthetic
cagtcatttggggttaatggcactggaa

SEQ ID NO: 4826 - DNA, 28 bp, Artificial Sequence
  Synthetic
cagtcatttgggcttggcactgggagaa

SEQ ID NO: 4827 - DNA, 28 bp, Artificial Sequence
  Synthetic
cagtcatttgggttttgtgaccgacact

SEQ ID NO: 4828 - DNA, 28 bp, Artificial Sequence
  Synthetic
cagtcatttgggtcaggtacctgaagta

SEQ ID NO: 4829 - DNA, 28 bp, Artificial Sequence
  Synthetic
cagtcatttgggtaggaacttcataccg

SEQ ID NO: 4830 - DNA, 28 bp, Artificial Sequence
  Synthetic
cagtcatttgggtaggaacttaataccg

SEQ ID NO: 4831 - DNA, 28 bp, Artificial Sequence
  Synthetic
cagtcatttgggtaaatgcactatctgg

SEQ ID NO: 4832 - DNA, 28 bp, Artificial Sequence
  Synthetic
cagtcatttgggtcggtgggactttcgt

SEQ ID NO: 4833 - DNA, 28 bp, Artificial Sequence
  Synthetic
cagtcatttgggtgactagatccacact

SEQ ID NO: 4834 - DNA, 28 bp, Artificial Sequence
  Synthetic
cagtcatttgggtgtatttacgttgcat

SEQ ID NO: 4835 - DNA, 28 bp, Artificial Sequence
  Synthetic
cagtcatttgggtgtcatggaattgctc

SEQ ID NO: 4836 - DNA, 28 bp, Artificial Sequence
  Synthetic
cagtcatttgggaatctagcctctacta

SEQ ID NO: 4837 - DNA, 28 bp, Artificial Sequence
  Synthetic
cagtcatttgggtaaatatcagctggta

SEQ ID NO: 4838 - DNA, 28 bp, Artificial Sequence
  Synthetic
cagtcatttgggtgaagtcagcaacttg

SEQ ID NO: 4839 - DNA, 28 bp, Artificial Sequence
  Synthetic
cagtcatttgggtagcaccattcgaaat

SEQ ID NO: 4840 - DNA, 28 bp, Artificial Sequence
  Synthetic
cagtcatttgggtgactagaccgaacac

SEQ ID NO: 4841 - DNA, 28 bp, Artificial Sequence
  Synthetic
cagtcatttgggtgtgttgaaaatcgtt

SEQ ID NO: 4842 - DNA, 28 bp, Artificial Sequence
  Synthetic
cagtcatttgggtttcatgtcgatttca

SEQ ID NO: 4843 - DNA, 28 bp, Artificial Sequence
  Synthetic
cagtcatttgggtaaatatttaagtgga

SEQ ID NO: 4844 - DNA, 28 bp, Artificial Sequence
  Synthetic
cagtcatttgggtatcacagccagcttt

SEQ ID NO: 4845 - DNA, 28 bp, Artificial Sequence
  Synthetic
cagtcatttgggtatcacagccagcttt

SEQ ID NO: 4846 - DNA, 28 bp, Artificial Sequence
  Synthetic
cagtcatttgggtatcacagccagcttt

SEQ ID NO: 4847 - DNA, 28 bp, Artificial Sequence
  Synthetic
cagtcatttgggtcactgggcaaagtgt

SEQ ID NO: 4848 - DNA, 28 bp, Artificial Sequence
  Synthetic
cagtcatttgggtaatctcaatttgtaa

SEQ ID NO: 4849 - DNA, 28 bp, Artificial Sequence
  Synthetic
cagtcatttgggattgtacttcatcagg

SEQ ID NO: 4850 - DNA, 28 bp, Artificial Sequence
  Synthetic
cagtcatttgggtcaggtacttagtgac

SEQ ID NO: 4851 - DNA, 28 bp, Artificial Sequence
  Synthetic
cagtcatttgggtcacaacctccttgag

SEQ ID NO: 4852 - DNA, 28 bp, Artificial Sequence
  Synthetic
cagtcatttgggaatcacaggattatac

SEQ ID NO: 4853 - DNA, 28 bp, Artificial Sequence
  Synthetic
cagtcatttggggcactgggtgaagttt

SEQ ID NO: 4854 - DNA, 28 bp, Artificial Sequence
  Synthetic
cagtcatttgggtattcgagccaataag

SEQ ID NO: 4855 - DNA, 28 bp, Artificial Sequence
  Synthetic
cagtcatttgggttttgattgttgctca

SEQ ID NO: 4856 - DNA, 28 bp, Artificial Sequence
  Synthetic
cagtcatttgggtgtctttttccgctta

SEQ ID NO: 4857 - DNA, 28 bp, Artificial Sequence
  Synthetic
cagtcatttgggtgaacacagctggtgg

SEQ ID NO: 4858 - DNA, 28 bp, Artificial Sequence
  Synthetic
cagtcatttgggtcactgggctttgttt

SEQ ID NO: 4859 - DNA, 28 bp, Artificial Sequence
  Synthetic
cagtcatttgggtggcaagatgtcggca

SEQ ID NO: 4860 - DNA, 28 bp, Artificial Sequence
  Synthetic
cagtcatttgggtggcaagatgtcggaa

SEQ ID NO: 4861 - DNA, 28 bp, Artificial Sequence
  Synthetic
cagtcatttgggaggtgcattgtagtcg

SEQ ID NO: 4862 - DNA, 28 bp, Artificial Sequence
  Synthetic
cagtcatttgggtggcagtgtggttagc

SEQ ID NO: 4863 - DNA, 28 bp, Artificial Sequence
  Synthetic
cagtcatttgggataaagctagacaacc

SEQ ID NO: 4864 - DNA, 28 bp, Artificial Sequence
  Synthetic
cagtcatttgggaaaggaacgatcgttg

SEQ ID NO: 4865 - DNA, 28 bp, Artificial Sequence
  Synthetic
cagtcatttgggtatcacagtggctgtt

SEQ ID NO: 4866 - DNA, 28 bp, Artificial Sequence
  Synthetic
cagtcatttgggtggaagactagtgatt

SEQ ID NO: 4867 - DNA, 28 bp, Artificial Sequence
  Synthetic
cagtcatttgggtaaagctagattacca

SEQ ID NO: 4868 - DNA, 28 bp, Artificial Sequence
  Synthetic
cagtcatttgggtaatactgtcaggtaa

SEQ ID NO: 4869 - DNA, 28 bp, Artificial Sequence
  Synthetic
cagtcatttgggttgagcaaaatttcag

SEQ ID NO: 4870 - DNA, 28 bp, Artificial Sequence
  Synthetic
cagtcatttgggcattgcacttgtcccg

SEQ ID NO: 4871 - DNA, 28 bp, Artificial Sequence
  Synthetic
cagtcatttgggaattgcactagtcccg

SEQ ID NO: 4872 - DNA, 28 bp, Artificial Sequence
  Synthetic
cagtcatttgggtctttggttatctagc

SEQ ID NO: 4873 - DNA, 28 bp, Artificial Sequence
  Synthetic
cagtcatttgggtctttggtgattttag

SEQ ID NO: 4874 - DNA, 28 bp, Artificial Sequence
  Synthetic
cagtcatttgggtctttggtattctagc

SEQ ID NO: 4875 - DNA, 28 bp, Artificial Sequence
  Synthetic
cagtcatttgggcggtataccttcagta

SEQ ID NO: 4876 - DNA, 28 bp, Artificial Sequence
  Synthetic
cagtcatttgggacgtatactgaatgta

SEQ ID NO: 4877 - DNA, 28 bp, Artificial Sequence
  Synthetic
cagtcatttgggtgaggtagtaggttgt

SEQ ID NO: 4878 - DNA, 28 bp, Artificial Sequence
  Synthetic
cagtcatttgggtgaggtagtaggttgt

SEQ ID NO: 4879 - DNA, 28 bp, Artificial Sequence
  Synthetic
cagtcatttgggtgaggtagtaggttgt

SEQ ID NO: 4880 - DNA, 28 bp, Artificial Sequence
  Synthetic
cagtcatttgggtgaggtagttggttgt

SEQ ID NO: 4881 - DNA, 28 bp, Artificial Sequence
  Synthetic
cagtcatttgggtgaggtagtagattga

SEQ ID NO: 4882 - DNA, 28 bp, Artificial Sequence
  Synthetic
cagtcatttgggtgaggtagtagattgt

SEQ ID NO: 4883 - DNA, 28 bp, Artificial Sequence
  Synthetic
cagtcatttgggtgaggtagtagtttgt

SEQ ID NO: 4884 - DNA, 28 bp, Artificial Sequence
  Synthetic
cagtcatttgggtgaggtagtaagttgt

SEQ ID NO: 4885 - DNA, 28 bp, Artificial Sequence
  Synthetic
cagtcatttgggtgaggtagtagtttgt

SEQ ID NO: 4886 - DNA, 28 bp, Artificial Sequence
  Synthetic
cagtcatttgggtgaggtagttgtttgt

SEQ ID NO: 4887 - DNA, 28 bp, Artificial Sequence
  Synthetic
cagtcatttgggtggaatgtaaagaagt

SEQ ID NO: 4888 - DNA, 28 bp, Artificial Sequence
  Synthetic
cagtcatttgggaacccgtagatccgaa

SEQ ID NO: 4889 - DNA, 28 bp, Artificial Sequence
  Synthetic
cagtcatttgggtacagtactgtgataa

SEQ ID NO: 4890 - DNA, 28 bp, Artificial Sequence
  Synthetic
cagtcatttgggtacagtactatgataa

SEQ ID NO: 4891 - DNA, 28 bp, Artificial Sequence
  Synthetic
cagtcatttgggagcagcattgtacagg

SEQ ID NO: 4892 - DNA, 28 bp, Artificial Sequence
  Synthetic
cagtcatttgggagcagcattgtacagg

SEQ ID NO: 4893 - DNA, 28 bp, Artificial Sequence
  Synthetic
cagtcatttgggtaccctgtagatccga

SEQ ID NO: 4894 - DNA, 28 bp, Artificial Sequence
  Synthetic
cagtcatttgggcaaattcgtgtcttgg

SEQ ID NO: 4895 - DNA, 28 bp, Artificial Sequence
  Synthetic
cagtcatttgggtaccctgtagaaccga

SEQ ID NO: 4896 - DNA, 28 bp, Artificial Sequence
  Synthetic
cagtcatttgggtaccctgtagatccgg

SEQ ID NO: 4897 - DNA, 28 bp, Artificial Sequence
  Synthetic
cagtcatttgggtaccctgtagaaccga

SEQ ID NO: 4898 - DNA, 28 bp, Artificial Sequence
  Synthetic
cagtcatttgggcagattcggttttagg

SEQ ID NO: 4899 - DNA, 28 bp, Artificial Sequence
  Synthetic
cagtcatttgggtggagtgtgacaatgg

SEQ ID NO: 4900 - DNA, 28 bp, Artificial Sequence
  Synthetic
cagtcatttgggtaaggcacgcggtgaa

SEQ ID NO: 4901 - DNA, 28 bp, Artificial Sequence
  Synthetic
cagtcatttgggtccctgagacccttaa

SEQ ID NO: 4902 - DNA, 28 bp, Artificial Sequence
  Synthetic
cagtcatttgggtccctgagaccctaac

SEQ ID NO: 4903 - DNA, 28 bp, Artificial Sequence
  Synthetic
cagtcatttgggtccctgagaccctaac

SEQ ID NO: 4904 - DNA, 28 bp, Artificial Sequence
  Synthetic
cagtcatttgggtcgtaccgtgagtaat

SEQ ID NO: 4905 - DNA, 28 bp, Artificial Sequence
  Synthetic
cagtcatttgggcattattacttttggt

SEQ ID NO: 4906 - DNA, 28 bp, Artificial Sequence
  Synthetic
cagtcatttgggtcacagtgaaccggtc

SEQ ID NO: 4907 - DNA, 28 bp, Artificial Sequence
  Synthetic
cagtcatttgggctttttgcggtctggg

SEQ ID NO: 4908 - DNA, 28 bp, Artificial Sequence
  Synthetic
cagtcatttgggaagcccttaccccaaa

SEQ ID NO: 4909 - DNA, 28 bp, Artificial Sequence
  Synthetic
cagtcatttgggcagtgcaatgttaaaa

SEQ ID NO: 4910 - DNA, 28 bp, Artificial Sequence
  Synthetic
cagtcatttgggcagtgcaataatgaaa

SEQ ID NO: 4911 - DNA, 28 bp, Artificial Sequence
  Synthetic
cagtcatttgggcagtgcaatattaaaa

SEQ ID NO: 4912 - DNA, 28 bp, Artificial Sequence
  Synthetic
cagtcatttgggtaacagtctacagcca

SEQ ID NO: 4913 - DNA, 28 bp, Artificial Sequence
  Synthetic
cagtcatttgggaccgtggcattagatt

SEQ ID NO: 4914 - DNA, 28 bp, Artificial Sequence
  Synthetic
cagtcatttgggtttggtccccttcaac

SEQ ID NO: 4915 - DNA, 28 bp, Artificial Sequence
  Synthetic
cagtcatttgggagctggtaaaatggaa

SEQ ID NO: 4916 - DNA, 28 bp, Artificial Sequence
  Synthetic
cagtcatttgggtttggtccccttcaac

SEQ ID NO: 4917 - DNA, 28 bp, Artificial Sequence
  Synthetic
cagtcatttggggctggtcaaatggaac

SEQ ID NO: 4918 - DNA, 28 bp, Artificial Sequence
  Synthetic
cagtcatttgggtttggtccctttcaac

SEQ ID NO: 4919 - DNA, 28 bp, Artificial Sequence
  Synthetic
cagtcatttgggtatggctttttattcc

SEQ ID NO: 4920 - DNA, 28 bp, Artificial Sequence
  Synthetic
cagtcatttgggtatggctttttattcc

SEQ ID NO: 4921 - DNA, 28 bp, Artificial Sequence
  Synthetic
cagtcatttgggtatggctttctattcc

SEQ ID NO: 4922 - DNA, 28 bp, Artificial Sequence
  Synthetic
cagtcatttgggttattgcttaagaata

SEQ ID NO: 4923 - DNA, 28 bp, Artificial Sequence
  Synthetic
cagtcatttgggagctggtgttgtgaat

SEQ ID NO: 4924 - DNA, 28 bp, Artificial Sequence
  Synthetic
cagtcatttgggtctacagtgcatgtgt

SEQ ID NO: 4925 - DNA, 28 bp, Artificial Sequence
  Synthetic
cagtcatttgggcagtggttttacccta

SEQ ID NO: 4926 - DNA, 28 bp, Artificial Sequence
  Synthetic
cagtcatttgggtaccacagggtagaac

SEQ ID NO: 4927 - DNA, 28 bp, Artificial Sequence
  Synthetic
cagtcatttgggtaacactgtctggtaa

SEQ ID NO: 4928 - DNA, 28 bp, Artificial Sequence
  Synthetic
cagtcatttgggtgtagtgtttcctact

SEQ ID NO: 4929 - DNA, 28 bp, Artificial Sequence
  Synthetic
cagtcatttgggcataaagtagaaagca

SEQ ID NO: 4930 - DNA, 28 bp, Artificial Sequence
  Synthetic
cagtcatttgggcataaagtagacagca

SEQ ID NO: 4931 - DNA, 28 bp, Artificial Sequence
  Synthetic
cagtcatttgggtgagatgaagcactgt

SEQ ID NO: 4932 - DNA, 28 bp, Artificial Sequence
  Synthetic
cagtcatttgggtacagtatagatgatg

SEQ ID NO: 4933 - DNA, 28 bp, Artificial Sequence
  Synthetic
cagtcatttggggtccagttttcccagg

SEQ ID NO: 4934 - DNA, 28 bp, Artificial Sequence
  Synthetic
cagtcatttgggtgagaactgaattcca

SEQ ID NO: 4935 - DNA, 28 bp, Artificial Sequence
  Synthetic
cagtcatttgggtgagaactgaattcca

SEQ ID NO: 4936 - DNA, 28 bp, Artificial Sequence
  Synthetic
cagtcatttgggtcagtgcattacagaa

SEQ ID NO: 4937 - DNA, 28 bp, Artificial Sequence
  Synthetic
cagtcatttgggtctcccaatccttgta

SEQ ID NO: 4938 - DNA, 28 bp, Artificial Sequence
  Synthetic
cagtcatttgggtcagtgcatgacagaa

SEQ ID NO: 4939 - DNA, 28 bp, Artificial Sequence
  Synthetic
cagtcatttgggttgcatagtcacaaaa

SEQ ID NO: 4940 - DNA, 28 bp, Artificial Sequence
  Synthetic
cagtcatttgggttgcatagtcacaaaa

SEQ ID NO: 4941 - DNA, 28 bp, Artificial Sequence
  Synthetic
cagtcatttgggttgcatagtcacaaaa

SEQ ID NO: 4942 - DNA, 28 bp, Artificial Sequence
  Synthetic
cagtcatttgggttaatgctaatcgtga

SEQ ID NO: 4943 - DNA, 28 bp, Artificial Sequence
  Synthetic
cagtcatttgggtagcagcacagaatgg

SEQ ID NO: 4944 - DNA, 28 bp, Artificial Sequence
  Synthetic
cagtcatttgggcaggccgtactgtgct

SEQ ID NO: 4945 - DNA, 28 bp, Artificial Sequence
  Synthetic
cagtcatttgggtagcagcacatcatgg

SEQ ID NO: 4946 - DNA, 28 bp, Artificial Sequence
  Synthetic
cagtcatttgggaagcagcgcgtcatgg

SEQ ID NO: 4947 - DNA, 28 bp, Artificial Sequence
  Synthetic
cagtcatttgggtagcagcacgtaaata

SEQ ID NO: 4948 - DNA, 28 bp, Artificial Sequence
  Synthetic
cagtcatttgggtagcagcacgtaaata

SEQ ID NO: 4949 - DNA, 28 bp, Artificial Sequence
  Synthetic
cagtcatttgggtagcagcatgtaaata

SEQ ID NO: 4950 - DNA, 28 bp, Artificial Sequence
  Synthetic
cagtcatttgggcaaagtgcttacagtg

SEQ ID NO: 4951 - DNA, 28 bp, Artificial Sequence
  Synthetic
cagtcatttgggactgcagtggaggcac

SEQ ID NO: 4952 - DNA, 28 bp, Artificial Sequence
  Synthetic
cagtcatttgggaacattcaacgctgtc

SEQ ID NO: 4953 - DNA, 28 bp, Artificial Sequence
  Synthetic
cagtcatttgggaccatcgaccgttgat

SEQ ID NO: 4954 - DNA, 28 bp, Artificial Sequence
  Synthetic
cagtcatttgggaacattcattgctgtc

SEQ ID NO: 4955 - DNA, 28 bp, Artificial Sequence
  Synthetic
cagtcatttgggcacattcattgctgtc

SEQ ID NO: 4956 - DNA, 28 bp, Artificial Sequence
  Synthetic
cagtcatttgggtttggcaatggtagaa

SEQ ID NO: 4957 - DNA, 28 bp, Artificial Sequence
  Synthetic
cagtcatttgggtggttctagacttgcc

SEQ ID NO: 4958 - DNA, 28 bp, Artificial Sequence
  Synthetic
cagtcatttgggtatggcactggtagaa

SEQ ID NO: 4959 - DNA, 28 bp, Artificial Sequence
  Synthetic
cagtcatttgggtggacggagaactgat

SEQ ID NO: 4960 - DNA, 28 bp, Artificial Sequence
  Synthetic
cagtcatttgggtcgtgtcttgtgttgc

SEQ ID NO: 4961 - DNA, 28 bp, Artificial Sequence
  Synthetic
cagtcatttgggtaaggtgcatctagtg

SEQ ID NO: 4962 - DNA, 28 bp, Artificial Sequence
  Synthetic
cagtcatttgggtaaggtgcatttagtg

SEQ ID NO: 4963 - DNA, 28 bp, Artificial Sequence
  Synthetic
cagtcatttgggctgccctaagtgcccc

SEQ ID NO: 4964 - DNA, 28 bp, Artificial Sequence
  Synthetic
cagtcatttgggtaaggtgcatcttgtg

SEQ ID NO: 4965 - DNA, 28 bp, Artificial Sequence
  Synthetic
cagtcatttgggtgatatgtttgatata

SEQ ID NO: 4966 - DNA, 28 bp, Artificial Sequence
  Synthetic
cagtcatttgggtgatatgtttgatatt

SEQ ID NO: 4967 - DNA, 28 bp, Artificial Sequence
  Synthetic
cagtcatttgggatgacctatgaattga

SEQ ID NO: 4968 - DNA, 28 bp, Artificial Sequence
  Synthetic
cagtcatttgggaactggcctacaaagt

SEQ ID NO: 4969 - DNA, 28 bp, Artificial Sequence
  Synthetic
cagtcatttgggaactggcccgcaaagt

SEQ ID NO: 4970 - DNA, 28 bp, Artificial Sequence
  Synthetic
cagtcatttgggtgtaacagcaactcca

SEQ ID NO: 4971 - DNA, 28 bp, Artificial Sequence
  Synthetic
cagtcatttgggtgtaacagccgctcca

SEQ ID NO: 4972 - DNA, 28 bp, Artificial Sequence
  Synthetic
cagtcatttgggtaggtagtttcatgtt

SEQ ID NO: 4973 - DNA, 28 bp, Artificial Sequence
  Synthetic
cagtcatttgggtaggtagtttcaagtt

SEQ ID NO: 4974 - DNA, 28 bp, Artificial Sequence
  Synthetic
cagtcatttgggcccagtgttcagacta

SEQ ID NO: 4975 - DNA, 28 bp, Artificial Sequence
  Synthetic
cagtcatttgggtacagtagtctgcaca

SEQ ID NO: 4976 - DNA, 28 bp, Artificial Sequence
  Synthetic
cagtcatttgggtgtgcaaatctatgca

SEQ ID NO: 4977 - DNA, 28 bp, Artificial Sequence
  Synthetic
cagtcatttgggctagttttgcatagtt

SEQ ID NO: 4978 - DNA, 28 bp, Artificial Sequence
  Synthetic
cagtcatttgggtgtgcaaatccatgca

SEQ ID NO: 4979 - DNA, 28 bp, Artificial Sequence
  Synthetic
cagtcatttgggagttttgctggtttgc

SEQ ID NO: 4980 - DNA, 28 bp, Artificial Sequence
  Synthetic
cagtcatttgggtgtgcaaatccatgca

SEQ ID NO: 4981 - DNA, 28 bp, Artificial Sequence
  Synthetic
cagtcatttgggtgtgcaaacccatgca

SEQ ID NO: 4982 - DNA, 28 bp, Artificial Sequence
  Synthetic
cagtcatttgggtaacactgtctggtaa

SEQ ID NO: 4983 - DNA, 28 bp, Artificial Sequence
  Synthetic
cagtcatttgggtaatactgcctggtaa

SEQ ID NO: 4984 - DNA, 28 bp, Artificial Sequence
  Synthetic
cagtcatttgggtaatactgcctggtaa

SEQ ID NO: 4985 - DNA, 28 bp, Artificial Sequence
  Synthetic
cagtcatttgggagaggcatagggcatg

SEQ ID NO: 4986 - DNA, 28 bp, Artificial Sequence
  Synthetic
cagtcatttgggttcctatgcatatacc

SEQ ID NO: 4987 - DNA, 28 bp, Artificial Sequence
  Synthetic
cagtcatttggggtgaaatgtttaggac

SEQ ID NO: 4988 - DNA, 28 bp, Artificial Sequence
  Synthetic
cagtcatttggggtgaaatgttcaggac

SEQ ID NO: 4989 - DNA, 28 bp, Artificial Sequence
  Synthetic
cagtcatttgggagtggttctcaacagt

SEQ ID NO: 4990 - DNA, 28 bp, Artificial Sequence
  Synthetic
cagtcatttgggttccctttgtcatcct

SEQ ID NO: 4991 - DNA, 28 bp, Artificial Sequence
  Synthetic
cagtcatttgggtccttcattccaccgg

SEQ ID NO: 4992 - DNA, 28 bp, Artificial Sequence
  Synthetic
cagtcatttgggtggaatgtaaggaagt

SEQ ID NO: 4993 - DNA, 28 bp, Artificial Sequence
  Synthetic
cagtcatttgggtaaagtgcttatagtg

SEQ ID NO: 4994 - DNA, 28 bp, Artificial Sequence
  Synthetic
cagtcatttgggactgcagtgtgagcac

SEQ ID NO: 4995 - DNA, 28 bp, Artificial Sequence
  Synthetic
cagtcatttgggcaaagtgctcacagtg

SEQ ID NO: 4996 - DNA, 28 bp, Artificial Sequence
  Synthetic
cagtcatttgggtagcttatcagactgg

SEQ ID NO: 4997 - DNA, 28 bp, Artificial Sequence
  Synthetic
cagtcatttgggctgtgcgtgtgacagc

SEQ ID NO: 4998 - DNA, 28 bp, Artificial Sequence
  Synthetic
cagtcatttgggagccactgactaacgc

SEQ ID NO: 4999 - DNA, 28 bp, Artificial Sequence
  Synthetic
cagtcatttgggtaacagtctacagtca

SEQ ID NO: 5000 - DNA, 28 bp, Artificial Sequence
  Synthetic
cagtcatttgggacagcaggcacagaca

SEQ ID NO: 5001 - DNA, 28 bp, Artificial Sequence
  Synthetic
cagtcatttgggtaatctcagctggcaa

SEQ ID NO: 5002 - DNA, 28 bp, Artificial Sequence
  Synthetic
cagtcatttgggtaatctctgcaggcaa

SEQ ID NO: 5003 - DNA, 28 bp, Artificial Sequence
  Synthetic
cagtcatttgggtactgcatcaggaact

SEQ ID NO: 5004 - DNA, 28 bp, Artificial Sequence
  Synthetic
cagtcatttgggttgtgcttgatctaac

SEQ ID NO: 5005 - DNA, 28 bp, Artificial Sequence
  Synthetic
cagtcatttgggttgtgcttgatctaac

SEQ ID NO: 5006 - DNA, 28 bp, Artificial Sequence
  Synthetic
cagtcatttgggtgattgtccaaacgca

SEQ ID NO: 5007 - DNA, 28 bp, Artificial Sequence
  Synthetic
cagtcatttgggccacaaccgtatcgga

SEQ ID NO: 5008 - DNA, 28 bp, Artificial Sequence
  Synthetic
cagtcatttgggagctacattgtctgct

SEQ ID NO: 5009 - DNA, 28 bp, Artificial Sequence
  Synthetic
cagtcatttgggagctacatctggctac

SEQ ID NO: 5010 - DNA, 28 bp, Artificial Sequence
  Synthetic
cagtcatttgggtgtcagtttgtcaaat

SEQ ID NO: 5011 - DNA, 28 bp, Artificial Sequence
  Synthetic
cagtcatttgggaagctgccagctgaag

SEQ ID NO: 5012 - DNA, 28 bp, Artificial Sequence
  Synthetic
cagtcatttgggaagctgccagttgaag

SEQ ID NO: 5013 - DNA, 28 bp, Artificial Sequence
  Synthetic
cagtcatttgggatcacattgccaggga

SEQ ID NO: 5014 - DNA, 28 bp, Artificial Sequence
  Synthetic
cagtcatttgggatcacattgccaggga

SEQ ID NO: 5015 - DNA, 28 bp, Artificial Sequence
  Synthetic
cagtcatttgggtggctcagttcagcag

SEQ ID NO: 5016 - DNA, 28 bp, Artificial Sequence
  Synthetic
cagtcatttgggcattgcacttgtctcg

SEQ ID NO: 5017 - DNA, 28 bp, Artificial Sequence
  Synthetic
cagtcatttgggttcaagtaatccagga

SEQ ID NO: 5018 - DNA, 28 bp, Artificial Sequence
  Synthetic
cagtcatttgggttcaagtaatccagga

SEQ ID NO: 5019 - DNA, 28 bp, Artificial Sequence
  Synthetic
cagtcatttgggttcacagtggctaagt

SEQ ID NO: 5020 - DNA, 28 bp, Artificial Sequence
  Synthetic
cagtcatttgggttcacagtggctaagt

SEQ ID NO: 5021 - DNA, 28 bp, Artificial Sequence
  Synthetic
cagtcatttgggttcacagtggttaagt

SEQ ID NO: 5022 - DNA, 28 bp, Artificial Sequence
  Synthetic
cagtcatttgggcttaacccacttgtga

SEQ ID NO: 5023 - DNA, 28 bp, Artificial Sequence
  Synthetic
cagtcatttgggttcacagtggctaagt

SEQ ID NO: 5024 - DNA, 28 bp, Artificial Sequence
  Synthetic
cagtcatttgggttcacagtggctaagt

SEQ ID NO: 5025 - DNA, 28 bp, Artificial Sequence
  Synthetic
cagtcatttgggtagcaccatttgaaat

SEQ ID NO: 5026 - DNA, 28 bp, Artificial Sequence
  Synthetic
cagtcatttgggtagcaccatttgaaat

SEQ ID NO: 5027 - DNA, 28 bp, Artificial Sequence
  Synthetic
cagtcatttgggcagtgcaatagtattg

SEQ ID NO: 5028 - DNA, 28 bp, Artificial Sequence
  Synthetic
cagtcatttgggcagtgcaatagtattg

SEQ ID NO: 5029 - DNA, 28 bp, Artificial Sequence
  Synthetic
cagtcatttgggcagtgcaatagtattg

SEQ ID NO: 5030 - DNA, 28 bp, Artificial Sequence
  Synthetic
cagtcatttgggtgtaaacattcccgac

SEQ ID NO: 5031 - DNA, 28 bp, Artificial Sequence
  Synthetic
cagtcatttgggtgtaaacatcctacac

SEQ ID NO: 5032 - DNA, 28 bp, Artificial Sequence
  Synthetic
cagtcatttgggtgtaaacatcctacac

SEQ ID NO: 5033 - DNA, 28 bp, Artificial Sequence
  Synthetic
cagtcatttgggtgtaaacatccccgac

SEQ ID NO: 5034 - DNA, 28 bp, Artificial Sequence
  Synthetic
cagtcatttgggtgtaaacatccttgac

SEQ ID NO: 5035 - DNA, 28 bp, Artificial Sequence
  Synthetic
cagtcatttgggctttcagtcggatgtt

SEQ ID NO: 5036 - DNA, 28 bp, Artificial Sequence
  Synthetic
cagtcatttgggggcaagatgttggcat

SEQ ID NO: 5037 - DNA, 28 bp, Artificial Sequence
  Synthetic
cagtcatttgggtccagcatcagtgatt

SEQ ID NO: 5038 - DNA, 28 bp, Artificial Sequence
  Synthetic
cagtcatttgggtggcagtgtcttagct

SEQ ID NO: 5039 - DNA, 28 bp, Artificial Sequence
  Synthetic
cagtcatttgggtaggcagtgttgttag

SEQ ID NO: 5040 - DNA, 28 bp, Artificial Sequence
  Synthetic
cagtcatttgggaggcagtgcagttagt

SEQ ID NO: 5041 - DNA, 28 bp, Artificial Sequence
  Synthetic
cagtcatttgggaattgcacggtatcca

SEQ ID NO: 5042 - DNA, 28 bp, Artificial Sequence
  Synthetic
cagtcatttgggtaatgcccctaaaaat

SEQ ID NO: 5043 - DNA, 28 bp, Artificial Sequence
  Synthetic
cagtcatttgggtttgttcgttcggctc

SEQ ID NO: 5044 - DNA, 28 bp, Artificial Sequence
  Synthetic
cagtcatttgggtaatactgtctggtaa

SEQ ID NO: 5045 - DNA, 28 bp, Artificial Sequence
  Synthetic
cagtcatttgggtaagtgctatttgttg

SEQ ID NO: 5046 - DNA, 28 bp, Artificial Sequence
  Synthetic
cagtcatttgggaaagtgctatcaagtt

SEQ ID NO: 5047 - DNA, 28 bp, Artificial Sequence
  Synthetic
cagtcatttgggtaagtgcttctctttg

SEQ ID NO: 5048 - DNA, 28 bp, Artificial Sequence
  Synthetic
cagtcatttgggtaagtgctatttgttg

SEQ ID NO: 5049 - DNA, 28 bp, Artificial Sequence
  Synthetic
cagtcatttgggaaagtgctatcaaatt

SEQ ID NO: 5050 - DNA, 28 bp, Artificial Sequence
  Synthetic
cagtcatttgggaaaccgttaccattac

SEQ ID NO: 5051 - DNA, 28 bp, Artificial Sequence
  Synthetic
cagtcatttgggtagtgcaatattgcta

SEQ ID NO: 5052 - DNA, 28 bp, Artificial Sequence
  Synthetic
cagtcatttgggtagtgcaatattgctt

SEQ ID NO: 5053 - DNA, 28 bp, Artificial Sequence
  Synthetic
cagtcatttgggtatgtgcccttggact

SEQ ID NO: 5054 - DNA, 28 bp, Artificial Sequence
  Synthetic
cagtcatttgggcaggctggttagatgg

SEQ ID NO: 5055 - DNA, 28 bp, Artificial Sequence
  Synthetic
cagtcatttgggaagcagcacatcaata

SEQ ID NO: 5056 - DNA, 28 bp, Artificial Sequence
  Synthetic
cagtcatttgggaagcagcacataaata

SEQ ID NO: 5057 - DNA, 28 bp, Artificial Sequence
  Synthetic
cagtcatttgggatagctctttgaatgg

SEQ ID NO: 5058 - DNA, 28 bp, Artificial Sequence
  Synthetic
cagtcatttgggtcagtaacaaggattc

SEQ ID NO: 5059 - DNA, 28 bp, Artificial Sequence
  Synthetic
cagtcatttgggcagggaatctctgtta

SEQ ID NO: 5060 - DNA, 28 bp, Artificial Sequence
  Synthetic
cagtcatttgggcacagcgcatacaatg

SEQ ID NO: 5061 - DNA, 28 bp, Artificial Sequence
  Synthetic
cagtcatttgggcctgcattgtacacac

SEQ ID NO: 5062 - DNA, 28 bp, Artificial Sequence
  Synthetic
cagtcatttgggtcaggaatgggctaaa

SEQ ID NO: 5063 - DNA, 28 bp, Artificial Sequence
  Synthetic
cagtcatttgggtaacggaacccataat

SEQ ID NO: 5064 - DNA, 28 bp, Artificial Sequence
  Synthetic
cagtcatttgggagtgacatcatatgta

SEQ ID NO: 5065 - DNA, 28 bp, Artificial Sequence
  Synthetic
cagtcatttgggttaagacttgcagtga

SEQ ID NO: 5066 - DNA, 28 bp, Artificial Sequence
  Synthetic
cagtcatttgggttttttgcagaaacgt

SEQ ID NO: 5067 - DNA, 28 bp, Artificial Sequence
  Synthetic
cagtcatttgggaagacatcaattaaat

SEQ ID NO: 5068 - DNA, 28 bp, Artificial Sequence
  Synthetic
cagtcatttggggacagttttaaatgat

SEQ ID NO: 5069 - DNA, 28 bp, Artificial Sequence
  Synthetic
cagtcatttgggttaaagggaatttgcg

SEQ ID NO: 5070 - DNA, 28 bp, Artificial Sequence
  Synthetic
cagtcatttgggttcagtcattgtttct

SEQ ID NO: 5071 - DNA, 28 bp, Artificial Sequence
  Synthetic
cagtcatttgggttcactactagcagaa

SEQ ID NO: 5072 - DNA, 28 bp, Artificial Sequence
  Synthetic
cagtcatttggggttgaggcgagttgaa

SEQ ID NO: 5073 - DNA, 28 bp, Artificial Sequence
  Synthetic
cagtcatttgggtcagtcttcaattcct

SEQ ID NO: 5074 - DNA, 28 bp, Artificial Sequence
  Synthetic
cagtcatttgggatactaagtacactac

SEQ ID NO: 5075 - DNA, 28 bp, Artificial Sequence
  Synthetic
cagtcatttgggcatgggtatgatacga

SEQ ID NO: 5076 - DNA, 28 bp, Artificial Sequence
  Synthetic
cagtcatttgggtcctcattgtgcatgc

SEQ ID NO: 5077 - DNA, 28 bp, Artificial Sequence
  Synthetic
cagtcatttgggaatgacacgttttctc

SEQ ID NO: 5078 - DNA, 28 bp, Artificial Sequence
  Synthetic
cagtcatttgggctcaaagcagagaact

SEQ ID NO: 5079 - DNA, 28 bp, Artificial Sequence
  Synthetic
cagtcatttgggtgcgttggtttagctc

SEQ ID NO: 5080 - DNA, 28 bp, Artificial Sequence
  Synthetic
cagtcatttggggtaaatgctgcagaat

SEQ ID NO: 5081 - DNA, 28 bp, Artificial Sequence
  Synthetic
cagtcatttgggctctcccaccgctaaa

SEQ ID NO: 5082 - DNA, 28 bp, Artificial Sequence
  Synthetic
cagtcatttggggtaagacgaacaaaaa

SEQ ID NO: 5083 - DNA, 28 bp, Artificial Sequence
  Synthetic
cagtcatttgggaatcaaaacctaaaga

SEQ ID NO: 5084 - DNA, 28 bp, Artificial Sequence
  Synthetic
cagtcatttggggctacggcccgcgtcg

SEQ ID NO: 5085 - DNA, 28 bp, Artificial Sequence
  Synthetic
cagtcatttgggaggccgaagtggagaa

SEQ ID NO: 5086 - DNA, 28 bp, Artificial Sequence
  Synthetic
cagtcatttgggataaaaagtggtatgg

SEQ ID NO: 5087 - DNA, 28 bp, Artificial Sequence
  Synthetic
cagtcatttgggtggaagactagtgatt

SEQ ID NO: 5088 - DNA, 28 bp, Artificial Sequence
  Synthetic
cagtcatttgggtggaagacttgtgatt

SEQ ID NO: 5089 - DNA, 28 bp, Artificial Sequence
  Synthetic
cagtcatttgggtctttggttatctagc

SEQ ID NO: 5090 - DNA, 28 bp, Artificial Sequence
  Synthetic
cagtcatttgggtaaagctagataaccg

SEQ ID NO: 5091 - DNA, 28 bp, Artificial Sequence
  Synthetic
cagtcatttgggtattgcacttgtcccg

SEQ ID NO: 5092 - DNA, 28 bp, Artificial Sequence
  Synthetic
cagtcatttgggtattgcactcgtcccg

SEQ ID NO: 5093 - DNA, 28 bp, Artificial Sequence
  Synthetic
cagtcatttgggaaaagtgctgtttgtg

SEQ ID NO: 5094 - DNA, 28 bp, Artificial Sequence
  Synthetic
cagtcatttgggtttggcactagcacat

SEQ ID NO: 5095 - DNA, 28 bp, Artificial Sequence
  Synthetic
cagtcatttgggaacccgtagatccgat

SEQ ID NO: 5096 - DNA, 28 bp, Artificial Sequence
  Synthetic
cagtcatttgggtagcaccgctatccac

SEQ ID NO: 5097 - DNA, 28 bp, Artificial Sequence
  Synthetic
cagtcatttgggtcttagtggaagtgac

SEQ ID NO: 5098 - DNA, 28 bp, Artificial Sequence
  Synthetic
cagtcatttgggacataaccatggagtt

SEQ ID NO: 5099 - DNA, 28 bp, Artificial Sequence
  Synthetic
cagtcatttgggacgcacaccaggctga

SEQ ID NO: 5100 - DNA, 28 bp, Artificial Sequence
  Synthetic
cagtcatttggggacagtttggtgcgct

SEQ ID NO: 5101 - DNA, 28 bp, Artificial Sequence
  Synthetic
cagtcatttgggtcctgtggtgtttggt

SEQ ID NO: 5102 - DNA, 28 bp, Artificial Sequence
  Synthetic
cagtcatttgggtgtaacttgccaggga

SEQ ID NO: 5103 - DNA, 28 bp, Artificial Sequence
  Synthetic
cagtcatttgggtaaatgctgcagtagt

SEQ ID NO: 5104 - DNA, 28 bp, Artificial Sequence
  Synthetic
cagtcatttgggtaccctacgctgccga

SEQ ID NO: 5105 - DNA, 28 bp, Artificial Sequence
  Synthetic
cagtcatttgggagtggttttgtttcct

SEQ ID NO: 5106 - DNA, 28 bp, Artificial Sequence
  Synthetic
cagtcatttgggatagagtgggtgtgtg

SEQ ID NO: 5107 - DNA, 28 bp, Artificial Sequence
  Synthetic
cagtcatttgggttgtatgcctggtgtc

SEQ ID NO: 5108 - DNA, 28 bp, Artificial Sequence
  Synthetic
cagtcatttgggaagaggacgcaggcat

SEQ ID NO: 5109 - DNA, 28 bp, Artificial Sequence
  Synthetic
cagtcatttgggcaagttcgcacttcct

SEQ ID NO: 5110 - DNA, 28 bp, Artificial Sequence
  Synthetic
cagtcatttgggtgttttgtttgcttgg

SEQ ID NO: 5111 - DNA, 28 bp, Artificial Sequence
  Synthetic
cagtcatttgggtattttctgcattcgc

SEQ ID NO: 5112 - DNA, 28 bp, Artificial Sequence
  Synthetic
cagtcatttgggcatgaaggcacagcct

SEQ ID NO: 5113 - DNA, 28 bp, Artificial Sequence
  Synthetic
cagtcatttggggtagcaggcatgtctt

SEQ ID NO: 5114 - DNA, 28 bp, Artificial Sequence
  Synthetic
cagtcatttgggcgcaccactagtcacc

SEQ ID NO: 5115 - DNA, 28 bp, Artificial Sequence
  Synthetic
cagtcatttgggaacctagtgttagtgt

SEQ ID NO: 5116 - DNA, 28 bp, Artificial Sequence
  Synthetic
cagtcatttggggacctgatgctgctgg

SEQ ID NO: 5117 - DNA, 28 bp, Artificial Sequence
  Synthetic
cagtcatttgggcaaggtgaatatagct

SEQ ID NO: 5118 - DNA, 28 bp, Artificial Sequence
  Synthetic
cagtcatttgggcggggatcggactagc

SEQ ID NO: 5119 - DNA, 28 bp, Artificial Sequence
  Synthetic
cagtcatttgggggttggtccaatccat

SEQ ID NO: 5120 - DNA, 28 bp, Artificial Sequence
  Synthetic
cagtcatttgggcatcatagtccagtgt

SEQ ID NO: 5121 - DNA, 28 bp, Artificial Sequence
  Synthetic
cagtcatttggggtcacaatctatgggg

SEQ ID NO: 5122 - DNA, 28 bp, Artificial Sequence
  Synthetic
cagtcatttgggtacggtttcctagatt

SEQ ID NO: 5123 - DNA, 28 bp, Artificial Sequence
  Synthetic
cagtcatttgggtaacacttcatgggtc

SEQ ID NO: 5124 - DNA, 28 bp, Artificial Sequence
  Synthetic
cagtcatttgggtaacctgatcagcccc

SEQ ID NO: 5125 - DNA, 28 bp, Artificial Sequence
  Synthetic
cagtcatttgggtatcttttgcggcaga

SEQ ID NO: 5126 - DNA, 28 bp, Artificial Sequence
  Synthetic
cagtcatttgggaaattctgttgcagca

SEQ ID NO: 5127 - DNA, 28 bp, Artificial Sequence
  Synthetic
cagtcatttgggtaacgggaagtgtgta

SEQ ID NO: 5128 - DNA, 28 bp, Artificial Sequence
  Synthetic
cagtcatttgggtgaggtagtaggttgt

SEQ ID NO: 5129 - DNA, 28 bp, Artificial Sequence
  Synthetic
cagtcatttgggtgaggtagtaggttgt

SEQ ID NO: 5130 - DNA, 28 bp, Artificial Sequence
  Synthetic
cagtcatttgggtgaggtagttggttgt

SEQ ID NO: 5131 - DNA, 28 bp, Artificial Sequence
  Synthetic
cagtcatttgggtgaggtagtagattga

SEQ ID NO: 5132 - DNA, 28 bp, Artificial Sequence
  Synthetic
cagtcatttgggtgaggtagtagtttgt

SEQ ID NO: 5133 - DNA, 28 bp, Artificial Sequence
  Synthetic
cagtcatttgggtgaggtagtaagttgt

SEQ ID NO: 5134 - DNA, 28 bp, Artificial Sequence
  Synthetic
cagtcatttgggtgaggtagtagtttgt

SEQ ID NO: 5135 - DNA, 28 bp, Artificial Sequence
  Synthetic
cagtcatttgggtgaggtagttttttgt

SEQ ID NO: 5136 - DNA, 28 bp, Artificial Sequence
  Synthetic
cagtcatttgggtggaatgtaaagaagt

SEQ ID NO: 5137 - DNA, 28 bp, Artificial Sequence
  Synthetic
cagtcatttgggaacccgtagatccgaa

SEQ ID NO: 5138 - DNA, 28 bp, Artificial Sequence
  Synthetic
cagtcatttgggtacagtactgtgataa

SEQ ID NO: 5139 - DNA, 28 bp, Artificial Sequence
  Synthetic
cagtcatttgggtacagtactatgataa

SEQ ID NO: 5140 - DNA, 28 bp, Artificial Sequence
  Synthetic
cagtcatttgggagcagcattgtacagg

SEQ ID NO: 5141 - DNA, 28 bp, Artificial Sequence
  Synthetic
cagtcatttgggagcagcattgtacagg

SEQ ID NO: 5142 - DNA, 28 bp, Artificial Sequence
  Synthetic
cagtcatttgggtaccctgtagaaccga

SEQ ID NO: 5143 - DNA, 28 bp, Artificial Sequence
  Synthetic
cagtcatttgggtaccctgtagatccgg

SEQ ID NO: 5144 - DNA, 28 bp, Artificial Sequence
  Synthetic
cagtcatttgggtaccctgtagaaccga

SEQ ID NO: 5145 - DNA, 28 bp, Artificial Sequence
  Synthetic
cagtcatttgggtggagtgtgacaatgg

SEQ ID NO: 5146 - DNA, 28 bp, Artificial Sequence
  Synthetic
cagtcatttgggtaaggcacgcggtgaa

SEQ ID NO: 5147 - DNA, 28 bp, Artificial Sequence
  Synthetic
cagtcatttgggtccctgagacccttaa

SEQ ID NO: 5148 - DNA, 28 bp, Artificial Sequence
  Synthetic
cagtcatttgggtccctgagaccctaac

SEQ ID NO: 5149 - DNA, 28 bp, Artificial Sequence
  Synthetic
cagtcatttgggtcgtaccgtgagtaat

SEQ ID NO: 5150 - DNA, 28 bp, Artificial Sequence
  Synthetic
cagtcatttgggtcacagtgaaccggtc

SEQ ID NO: 5151 - DNA, 28 bp, Artificial Sequence
  Synthetic
cagtcatttgggctttttgcggtctggg

SEQ ID NO: 5152 - DNA, 28 bp, Artificial Sequence
  Synthetic
cagtcatttgggcagtgcaatattaaaa

SEQ ID NO: 5153 - DNA, 28 bp, Artificial Sequence
  Synthetic
cagtcatttgggtaacagtctacagcca

SEQ ID NO: 5154 - DNA, 28 bp, Artificial Sequence
  Synthetic
cagtcatttgggtttggtccccttcaac

SEQ ID NO: 5155 - DNA, 28 bp, Artificial Sequence
  Synthetic
cagtcatttgggtatggctttctattcc

SEQ ID NO: 5156 - DNA, 28 bp, Artificial Sequence
  Synthetic
cagtcatttgggtatggctttttattcc

SEQ ID NO: 5157 - DNA, 28 bp, Artificial Sequence
  Synthetic
cagtcatttgggttattgcttaagaata

SEQ ID NO: 5158 - DNA, 28 bp, Artificial Sequence
  Synthetic
cagtcatttgggagctggtgttgtgaat

SEQ ID NO: 5159 - DNA, 28 bp, Artificial Sequence
  Synthetic
cagtcatttgggcagtggttttacccta

SEQ ID NO: 5160 - DNA, 28 bp, Artificial Sequence
  Synthetic
cagtcatttgggcataaagtagaaagca

SEQ ID NO: 5161 - DNA, 28 bp, Artificial Sequence
  Synthetic
cagtcatttgggcataaagtagaaagca

SEQ ID NO: 5162 - DNA, 28 bp, Artificial Sequence
  Synthetic
cagtcatttgggtacagtatagatgatg

SEQ ID NO: 5163 - DNA, 28 bp, Artificial Sequence
  Synthetic
cagtcatttgggtcagtgcattacagaa

SEQ ID NO: 5164 - DNA, 28 bp, Artificial Sequence
  Synthetic
cagtcatttgggtcagtgcataacagaa

SEQ ID NO: 5165 - DNA, 28 bp, Artificial Sequence
  Synthetic
cagtcatttgggttgcatagtcacaaaa

SEQ ID NO: 5166 - DNA, 28 bp, Artificial Sequence
  Synthetic
cagtcatttgggttgcatagtcacaaaa

SEQ ID NO: 5167 - DNA, 28 bp, Artificial Sequence
  Synthetic
cagtcatttgggtagcagcacggaatgg

SEQ ID NO: 5168 - DNA, 28 bp, Artificial Sequence
  Synthetic
cagtcatttgggtagcagcgcatcatgg

SEQ ID NO: 5169 - DNA, 28 bp, Artificial Sequence
  Synthetic
cagtcatttgggtagcagcacgtaaata

SEQ ID NO: 5170 - DNA, 28 bp, Artificial Sequence
  Synthetic
cagtcatttgggcaaagtgcttacagtg

SEQ ID NO: 5171 - DNA, 28 bp, Artificial Sequence
  Synthetic
cagtcatttgggtaaggtgcatctagtg

SEQ ID NO: 5172 - DNA, 28 bp, Artificial Sequence
  Synthetic
cagtcatttgggaacattcaacgctgtc

SEQ ID NO: 5173 - DNA, 28 bp, Artificial Sequence
  Synthetic
cagtcatttgggaccatcgaccgttgat

SEQ ID NO: 5174 - DNA, 28 bp, Artificial Sequence
  Synthetic
cagtcatttgggaacattcattgctgtc

SEQ ID NO: 5175 - DNA, 28 bp, Artificial Sequence
  Synthetic
cagtcatttgggtggttctagacttgcc

SEQ ID NO: 5176 - DNA, 28 bp, Artificial Sequence
  Synthetic
cagtcatttgggtatggcactggtagaa

SEQ ID NO: 5177 - DNA, 28 bp, Artificial Sequence
  Synthetic
cagtcatttgggtggacggagaactgat

SEQ ID NO: 5178 - DNA, 28 bp, Artificial Sequence
  Synthetic
cagtcatttgggtcgtgtcttgtgttgc

SEQ ID NO: 5179 - DNA, 28 bp, Artificial Sequence
  Synthetic
cagtcatttggggtgcctactgaactgg

SEQ ID NO: 5180 - DNA, 28 bp, Artificial Sequence
  Synthetic
cagtcatttgggtgatatgtttgatata

SEQ ID NO: 5181 - DNA, 28 bp, Artificial Sequence
  Synthetic
cagtcatttgggatgacctatgaattga

SEQ ID NO: 5182 - DNA, 28 bp, Artificial Sequence
  Synthetic
cagtcatttgggaactggcctacaaagt

SEQ ID NO: 5183 - DNA, 28 bp, Artificial Sequence
  Synthetic
cagtcatttgggtgtaacagcaactcca

SEQ ID NO: 5184 - DNA, 28 bp, Artificial Sequence
  Synthetic
cagtcatttgggtaggtagtttcatgtt

SEQ ID NO: 5185 - DNA, 28 bp, Artificial Sequence
  Synthetic
cagtcatttgggtaggtagtttcaagtt

SEQ ID NO: 5186 - DNA, 28 bp, Artificial Sequence
  Synthetic
cagtcatttgggcccagtgttcagacta

SEQ ID NO: 5187 - DNA, 28 bp, Artificial Sequence
  Synthetic
cagtcatttgggtgtgcaaatctatgca

SEQ ID NO: 5188 - DNA, 28 bp, Artificial Sequence
  Synthetic
cagtcatttgggtgtgcaaatccatgca

SEQ ID NO: 5189 - DNA, 28 bp, Artificial Sequence
  Synthetic
cagtcatttgggtaaagtgcttatagtg

SEQ ID NO: 5190 - DNA, 28 bp, Artificial Sequence
  Synthetic
cagtcatttgggtaacactgtctggtaa

SEQ ID NO: 5191 - DNA, 28 bp, Artificial Sequence
  Synthetic
cagtcatttgggtaatactgcctggtaa

SEQ ID NO: 5192 - DNA, 28 bp, Artificial Sequence
  Synthetic
cagtcatttgggagaggcatagggcatg

SEQ ID NO: 5193 - DNA, 28 bp, Artificial Sequence
  Synthetic
cagtcatttggggtgaaatgtttaggac

SEQ ID NO: 5194 - DNA, 28 bp, Artificial Sequence
  Synthetic
cagtcatttgggttccctttgtcatcct

SEQ ID NO: 5195 - DNA, 28 bp, Artificial Sequence
  Synthetic
cagtcatttgggtccttcattccaccgg

SEQ ID NO: 5196 - DNA, 28 bp, Artificial Sequence
  Synthetic
cagtcatttgggtagcttatcagactgg

SEQ ID NO: 5197 - DNA, 28 bp, Artificial Sequence
  Synthetic
cagtcatttgggctgtgcgtgtgacagc

SEQ ID NO: 5198 - DNA, 28 bp, Artificial Sequence
  Synthetic
cagtcatttgggtaacagtctacagtca

SEQ ID NO: 5199 - DNA, 28 bp, Artificial Sequence
  Synthetic
cagtcatttgggacagcaggcacagaca

SEQ ID NO: 5200 - DNA, 28 bp, Artificial Sequence
  Synthetic
cagtcatttgggaaatctcagctggcaa

SEQ ID NO: 5201 - DNA, 28 bp, Artificial Sequence
  Synthetic
cagtcatttgggtaatctctgcaggcaa

SEQ ID NO: 5202 - DNA, 28 bp, Artificial Sequence
  Synthetic
cagtcatttgggtactgcatcaggaact

SEQ ID NO: 5203 - DNA, 28 bp, Artificial Sequence
  Synthetic
cagtcatttgggttgtgcttgatctaac

SEQ ID NO: 5204 - DNA, 28 bp, Artificial Sequence
  Synthetic
cagtcatttgggttgtgcttgatctaac

SEQ ID NO: 5205 - DNA, 28 bp, Artificial Sequence
  Synthetic
cagtcatttgggtgattgtccaaacgca

SEQ ID NO: 5206 - DNA, 28 bp, Artificial Sequence
  Synthetic
cagtcatttgggagctacattgtctgct

SEQ ID NO: 5207 - DNA, 28 bp, Artificial Sequence
  Synthetic
cagtcatttgggagctacatctggctac

SEQ ID NO: 5208 - DNA, 28 bp, Artificial Sequence
  Synthetic
cagtcatttgggtgtcagtttgtcaaat

SEQ ID NO: 5209 - DNA, 28 bp, Artificial Sequence
  Synthetic
cagtcatttgggaagctgccagctgaag

SEQ ID NO: 5210 - DNA, 28 bp, Artificial Sequence
  Synthetic
cagtcatttgggaagctgccagttgaag

SEQ ID NO: 5211 - DNA, 28 bp, Artificial Sequence
  Synthetic
cagtcatttgggatcacattgccaggga

SEQ ID NO: 5212 - DNA, 28 bp, Artificial Sequence
  Synthetic
cagtcatttgggatcacattgccaggga

SEQ ID NO: 5213 - DNA, 28 bp, Artificial Sequence
  Synthetic
cagtcatttgggtggctcagttcagcag

SEQ ID NO: 5214 - DNA, 28 bp, Artificial Sequence
  Synthetic
cagtcatttgggcattgcacttgtctcg

SEQ ID NO: 5215 - DNA, 28 bp, Artificial Sequence
  Synthetic
cagtcatttgggttcaagtaatccagga

SEQ ID NO: 5216 - DNA, 28 bp, Artificial Sequence
  Synthetic
cagtcatttgggttcacagtggctaagt

SEQ ID NO: 5217 - DNA, 28 bp, Artificial Sequence
  Synthetic
cagtcatttgggttcacagtggttaagt

SEQ ID NO: 5218 - DNA, 28 bp, Artificial Sequence
  Synthetic
cagtcatttgggttcacagtggctaagt

SEQ ID NO: 5219 - DNA, 28 bp, Artificial Sequence
  Synthetic
cagtcatttgggtagcaccatttgaaat

SEQ ID NO: 5220 - DNA, 28 bp, Artificial Sequence
  Synthetic
cagtcatttgggtagcaccatttgaaat

SEQ ID NO: 5221 - DNA, 28 bp, Artificial Sequence
  Synthetic
cagtcatttgggcagtgcaatagtattg

SEQ ID NO: 5222 - DNA, 28 bp, Artificial Sequence
  Synthetic
cagtcatttgggtgtaaacatcctacac

SEQ ID NO: 5223 - DNA, 28 bp, Artificial Sequence
  Synthetic
cagtcatttgggtgtaaacatcctacac

SEQ ID NO: 5224 - DNA, 28 bp, Artificial Sequence
  Synthetic
cagtcatttgggtgtaaacatccccgac

SEQ ID NO: 5225 - DNA, 28 bp, Artificial Sequence
  Synthetic
cagtcatttgggtccagcatcagtgatt

SEQ ID NO: 5226 - DNA, 28 bp, Artificial Sequence
  Synthetic
cagtcatttgggtaatgcccctaaaaat

SEQ ID NO: 5227 - DNA, 28 bp, Artificial Sequence
  Synthetic
cagtcatttgggtttgttcgttcggctc

SEQ ID NO: 5228 - DNA, 28 bp, Artificial Sequence
  Synthetic
cagtcatttgggtaatactgtctggtaa

SEQ ID NO: 5229 - DNA, 28 bp, Artificial Sequence
  Synthetic
cagtcatttgggtatgtgcccttggact

SEQ ID NO: 5230 - DNA, 28 bp, Artificial Sequence
  Synthetic
cagtcatttgggatagctctttaaatgg

SEQ ID NO: 5231 - DNA, 28 bp, Artificial Sequence
  Synthetic
cagtcatttgggcacagcgcatacaatg

SEQ ID NO: 5232 - DNA, 28 bp, Artificial Sequence
  Synthetic
cagtcatttgggagtgacatcatatgta

SEQ ID NO: 5233 - DNA, 28 bp, Artificial Sequence
  Synthetic
cagtcatttgggtggaagactagtgatt

SEQ ID NO: 5234 - DNA, 28 bp, Artificial Sequence
  Synthetic
cagtcatttgggtctttggttatctagc

SEQ ID NO: 5235 - DNA, 28 bp, Artificial Sequence
  Synthetic
cagtcatttgggtattgcacttgtcccg

SEQ ID NO: 5236 - DNA, 28 bp, Artificial Sequence
  Synthetic
cagtcatttgggtttggcactagcacat

SEQ ID NO: 5237 - DNA, 28 bp, Artificial Sequence
  Synthetic
cagtcatttgggtgaggtagtaggttgt

SEQ ID NO: 5238 - DNA, 28 bp, Artificial Sequence
  Synthetic
cagtcatttgggtgaggtagtaggttgt

SEQ ID NO: 5239 - DNA, 28 bp, Artificial Sequence
  Synthetic
cagtcatttgggtgaggtagtaggttgt

SEQ ID NO: 5240 - DNA, 28 bp, Artificial Sequence
  Synthetic
cagtcatttgggagaggtagtgggttgc

SEQ ID NO: 5241 - DNA, 28 bp, Artificial Sequence
  Synthetic
cagtcatttgggtgaggtagtagattgt

SEQ ID NO: 5242 - DNA, 28 bp, Artificial Sequence
  Synthetic
cagtcatttgggtgaggtagtagtttgt

SEQ ID NO: 5243 - DNA, 28 bp, Artificial Sequence
  Synthetic
cagtcatttgggtgaggtagtagtttgt

SEQ ID NO: 5244 - DNA, 28 bp, Artificial Sequence
  Synthetic
cagtcatttgggtgaggtagtaggttgt

SEQ ID NO: 5245 - DNA, 28 bp, Artificial Sequence
  Synthetic
cagtcatttgggtgaggtagtagattga

SEQ ID NO: 5246 - DNA, 28 bp, Artificial Sequence
  Synthetic
cagtcatttgggaacccgtagatccgaa

SEQ ID NO: 5247 - DNA, 28 bp, Artificial Sequence
  Synthetic
cagtcatttgggtacagtactgtgataa

SEQ ID NO: 5248 - DNA, 28 bp, Artificial Sequence
  Synthetic
cagtcatttgggagcagcattgtacagg

SEQ ID NO: 5249 - DNA, 28 bp, Artificial Sequence
  Synthetic
cagtcatttgggaaaagtgcttacagtg

SEQ ID NO: 5250 - DNA, 28 bp, Artificial Sequence
  Synthetic
cagtcatttgggagcagcattgtacagg

SEQ ID NO: 5251 - DNA, 28 bp, Artificial Sequence
  Synthetic
cagtcatttgggtaccctgtagaaccga

SEQ ID NO: 5252 - DNA, 28 bp, Artificial Sequence
  Synthetic
cagtcatttgggtggagtgtgacaatgg

SEQ ID NO: 5253 - DNA, 28 bp, Artificial Sequence
  Synthetic
cagtcatttgggttaaggcacgcggtga

SEQ ID NO: 5254 - DNA, 28 bp, Artificial Sequence
  Synthetic
cagtcatttgggttaaggcacgcagtga

SEQ ID NO: 5255 - DNA, 28 bp, Artificial Sequence
  Synthetic
cagtcatttgggtccctgagaccctaac

SEQ ID NO: 5256 - DNA, 28 bp, Artificial Sequence
  Synthetic
cagtcatttgggtcgtaccgtgagtaat

SEQ ID NO: 5257 - DNA, 28 bp, Artificial Sequence
  Synthetic
cagtcatttgggcattattacttttggt

SEQ ID NO: 5258 - DNA, 28 bp, Artificial Sequence
  Synthetic
cagtcatttgggtcacagtgaaccggtc

SEQ ID NO: 5259 - DNA, 28 bp, Artificial Sequence
  Synthetic
cagtcatttgggcagtgcaatattaaaa

SEQ ID NO: 5260 - DNA, 28 bp, Artificial Sequence
  Synthetic
cagtcatttgggcagtgcaataatgaaa

SEQ ID NO: 5261 - DNA, 28 bp, Artificial Sequence
  Synthetic
cagtcatttgggttggtccccttcaacc

SEQ ID NO: 5262 - DNA, 28 bp, Artificial Sequence
  Synthetic
cagtcatttgggttggtccccttcaacc

SEQ ID NO: 5263 - DNA, 28 bp, Artificial Sequence
  Synthetic
cagtcatttgggttggtccccttcaacc

SEQ ID NO: 5264 - DNA, 28 bp, Artificial Sequence
  Synthetic
cagtcatttgggtatggctttttattcc

SEQ ID NO: 5265 - DNA, 28 bp, Artificial Sequence
  Synthetic
cagtcatttgggtattgcttaagaatac

SEQ ID NO: 5266 - DNA, 28 bp, Artificial Sequence
  Synthetic
cagtcatttgggagctggtgttgtgaat

SEQ ID NO: 5267 - DNA, 28 bp, Artificial Sequence
  Synthetic
cagtcatttgggagtggttttaccctat

SEQ ID NO: 5268 - DNA, 28 bp, Artificial Sequence
  Synthetic
cagtcatttgggccacagggtagaacca

SEQ ID NO: 5269 - DNA, 28 bp, Artificial Sequence
  Synthetic
cagtcatttgggtgtagtgtttcctact

SEQ ID NO: 5270 - DNA, 28 bp, Artificial Sequence
  Synthetic
cagtcatttgggcccataaagtagaaag

SEQ ID NO: 5271 - DNA, 28 bp, Artificial Sequence
  Synthetic
cagtcatttgggctacagtatagatgat

SEQ ID NO: 5272 - DNA, 28 bp, Artificial Sequence
  Synthetic
cagtcatttgggtgagaactgaattcca

SEQ ID NO: 5273 - DNA, 28 bp, Artificial Sequence
  Synthetic
cagtcatttgggtgagaactgaattcca

SEQ ID NO: 5274 - DNA, 28 bp, Artificial Sequence
  Synthetic
cagtcatttgggccctatggattcagtt

SEQ ID NO: 5275 - DNA, 28 bp, Artificial Sequence
  Synthetic
cagtcatttggggtgtgcggaaatgctt

SEQ ID NO: 5276 - DNA, 28 bp, Artificial Sequence
  Synthetic
cagtcatttgggtcagtgcactacagaa

SEQ ID NO: 5277 - DNA, 28 bp, Artificial Sequence
  Synthetic
cagtcatttgggttgcatagtcacaaaa

SEQ ID NO: 5278 - DNA, 28 bp, Artificial Sequence
  Synthetic
cagtcatttgggttaatgctaatcgtga

SEQ ID NO: 5279 - DNA, 28 bp, Artificial Sequence
  Synthetic
cagtcatttgggtagcagcacataatgg

SEQ ID NO: 5280 - DNA, 28 bp, Artificial Sequence
  Synthetic
cagtcatttgggtagcagcacatcatgg

SEQ ID NO: 5281 - DNA, 28 bp, Artificial Sequence
  Synthetic
cagtcatttgggtagcagcacgtaaata

SEQ ID NO: 5282 - DNA, 28 bp, Artificial Sequence
  Synthetic
cagtcatttgggactgcagtgaaggcac

SEQ ID NO: 5283 - DNA, 28 bp, Artificial Sequence
  Synthetic
cagtcatttgggcaaagtgcttacagtg

SEQ ID NO: 5284 - DNA, 28 bp, Artificial Sequence
  Synthetic
cagtcatttgggaacattcaacgctgtc

SEQ ID NO: 5285 - DNA, 28 bp, Artificial Sequence
  Synthetic
cagtcatttgggaccatcgaccgttgat

SEQ ID NO: 5286 - DNA, 28 bp, Artificial Sequence
  Synthetic
cagtcatttgggaacattcattgctgtc

SEQ ID NO: 5287 - DNA, 28 bp, Artificial Sequence
  Synthetic
cagtcatttgggtatggcactggtagaa

SEQ ID NO: 5288 - DNA, 28 bp, Artificial Sequence
  Synthetic
cagtcatttgggtggacggagaactgat

SEQ ID NO: 5289 - DNA, 28 bp, Artificial Sequence
  Synthetic
cagtcatttgggtcgtgtcttgtgttgc

SEQ ID NO: 5290 - DNA, 28 bp, Artificial Sequence
  Synthetic
cagtcatttgggtaaggtgcatctagtg

SEQ ID NO: 5291 - DNA, 28 bp, Artificial Sequence
  Synthetic
cagtcatttgggtaaggtgcatctagtg

SEQ ID NO: 5292 - DNA, 28 bp, Artificial Sequence
  Synthetic
cagtcatttgggtgatatgtttgatata

SEQ ID NO: 5293 - DNA, 28 bp, Artificial Sequence
  Synthetic
cagtcatttgggaactggcccacaaagt

SEQ ID NO: 5294 - DNA, 28 bp, Artificial Sequence
  Synthetic
cagtcatttgggtgtaacagcaactcca

SEQ ID NO: 5295 - DNA, 28 bp, Artificial Sequence
  Synthetic
cagtcatttgggtaggtagtttcatgtt

SEQ ID NO: 5296 - DNA, 28 bp, Artificial Sequence
  Synthetic
cagtcatttgggcccagtgttcagacta

SEQ ID NO: 5297 - DNA, 28 bp, Artificial Sequence
  Synthetic
cagtcatttgggtacagtagtctgcaca

SEQ ID NO: 5298 - DNA, 28 bp, Artificial Sequence
  Synthetic
cagtcatttgggtgtgcaaatctatgca

SEQ ID NO: 5299 - DNA, 28 bp, Artificial Sequence
  Synthetic
cagtcatttgggtgtgcaaatccatgca

SEQ ID NO: 5300 - DNA, 28 bp, Artificial Sequence
  Synthetic
cagtcatttgggtggaatgtaaagaagt

SEQ ID NO: 5301 - DNA, 28 bp, Artificial Sequence
  Synthetic
cagtcatttgggtggaatgttaagaagt

SEQ ID NO: 5302 - DNA, 28 bp, Artificial Sequence
  Synthetic
cagtcatttgggtaacactgtctggtaa

SEQ ID NO: 5303 - DNA, 28 bp, Artificial Sequence
  Synthetic
cagtcatttgggtaatactgcctggtaa

SEQ ID NO: 5304 - DNA, 28 bp, Artificial Sequence
  Synthetic
cagtcatttgggagaggcatagagcatg

SEQ ID NO: 5305 - DNA, 28 bp, Artificial Sequence
  Synthetic
cagtcatttgggtttcctatgcatatac

SEQ ID NO: 5306 - DNA, 28 bp, Artificial Sequence
  Synthetic
cagtcatttggggtgaaatgtttaggac

SEQ ID NO: 5307 - DNA, 28 bp, Artificial Sequence
  Synthetic
cagtcatttgggttccctttgtcatcct

SEQ ID NO: 5308 - DNA, 28 bp, Artificial Sequence
  Synthetic
cagtcatttgggtccttcattccaccgg

SEQ ID NO: 5309 - DNA, 28 bp, Artificial Sequence
  Synthetic
cagtcatttgggcccttcattccaccgg

SEQ ID NO: 5310 - DNA, 28 bp, Artificial Sequence
  Synthetic
cagtcatttgggtggaatgtaaggaagt

SEQ ID NO: 5311 - DNA, 28 bp, Artificial Sequence
  Synthetic
cagtcatttgggtaaagtgcttatagtg

SEQ ID NO: 5312 - DNA, 28 bp, Artificial Sequence
  Synthetic
cagtcatttgggcaaagtgctcatagtg

SEQ ID NO: 5313 - DNA, 28 bp, Artificial Sequence
  Synthetic
cagtcatttgggtagcttatcagactga

SEQ ID NO: 5314 - DNA, 28 bp, Artificial Sequence
  Synthetic
cagtcatttgggttccctttgtcatcct

SEQ ID NO: 5315 - DNA, 28 bp, Artificial Sequence
  Synthetic
cagtcatttgggatgacctatgaattga

SEQ ID NO: 5316 - DNA, 28 bp, Artificial Sequence
  Synthetic
cagtcatttgggtaatctcagctggcaa

SEQ ID NO: 5317 - DNA, 28 bp, Artificial Sequence
  Synthetic
cagtcatttgggtactgcatcaggaact

SEQ ID NO: 5318 - DNA, 28 bp, Artificial Sequence
  Synthetic
cagtcatttgggttgtgcttgatctaac

SEQ ID NO: 5319 - DNA, 28 bp, Artificial Sequence
  Synthetic
cagtcatttgggtgattgtccaaacgca

SEQ ID NO: 5320 - DNA, 28 bp, Artificial Sequence
  Synthetic
cagtcatttgggagctacattgtctgct

SEQ ID NO: 5321 - DNA, 28 bp, Artificial Sequence
  Synthetic
cagtcatttgggagctacatctggctac

SEQ ID NO: 5322 - DNA, 28 bp, Artificial Sequence
  Synthetic
cagtcatttgggaactacatctggctac

SEQ ID NO: 5323 - DNA, 28 bp, Artificial Sequence
  Synthetic
cagtcatttgggtgtcagtttgtcaaat

SEQ ID NO: 5324 - DNA, 28 bp, Artificial Sequence
  Synthetic
cagtcatttgggatcacattgccaggga

SEQ ID NO: 5325 - DNA, 28 bp, Artificial Sequence
  Synthetic
cagtcatttgggtggctcagttcagcag

SEQ ID NO: 5326 - DNA, 28 bp, Artificial Sequence
  Synthetic
cagtcatttgggttcaagtaatccagga

SEQ ID NO: 5327 - DNA, 28 bp, Artificial Sequence
  Synthetic
cagtcatttgggttcacagtggctaagt

SEQ ID NO: 5328 - DNA, 28 bp, Artificial Sequence
  Synthetic
cagtcatttgggtagcaccatttgaaat

SEQ ID NO: 5329 - DNA, 28 bp, Artificial Sequence
  Synthetic
cagtcatttgggtagcaccatttgaaat

SEQ ID NO: 5330 - DNA, 28 bp, Artificial Sequence
  Synthetic
cagtcatttgggtagcaccatttgaaat

SEQ ID NO: 5331 - DNA, 28 bp, Artificial Sequence
  Synthetic
cagtcatttgggcagtgcaataatattg

SEQ ID NO: 5332 - DNA, 28 bp, Artificial Sequence
  Synthetic
cagtcatttgggaagtgcttccatgttt

SEQ ID NO: 5333 - DNA, 28 bp, Artificial Sequence
  Synthetic
cagtcatttgggtaagtgcttccatgtt

SEQ ID NO: 5334 - DNA, 28 bp, Artificial Sequence
  Synthetic
cagtcatttgggactttaacatggaggt

SEQ ID NO: 5335 - DNA, 28 bp, Artificial Sequence
  Synthetic
cagtcatttgggtaagtgcttccatgtt

SEQ ID NO: 5336 - DNA, 28 bp, Artificial Sequence
  Synthetic
cagtcatttgggtttaacatggaggtac

SEQ ID NO: 5337 - DNA, 28 bp, Artificial Sequence
  Synthetic
cagtcatttgggtaagtgcttccatgtt

SEQ ID NO: 5338 - DNA, 28 bp, Artificial Sequence
  Synthetic
cagtcatttgggctttcagtcggatgtt

SEQ ID NO: 5339 - DNA, 28 bp, Artificial Sequence
  Synthetic
cagtcatttgggtgtaaacatcctcgac

SEQ ID NO: 5340 - DNA, 28 bp, Artificial Sequence
  Synthetic
cagtcatttgggtgtaaacatcctacac

SEQ ID NO: 5341 - DNA, 28 bp, Artificial Sequence
  Synthetic
cagtcatttgggtgtaaacatcctacac

SEQ ID NO: 5342 - DNA, 28 bp, Artificial Sequence
  Synthetic
cagtcatttgggtgtaaacatccccgac

SEQ ID NO: 5343 - DNA, 28 bp, Artificial Sequence
  Synthetic
cagtcatttgggtgtaaacatccttgac

SEQ ID NO: 5344 - DNA, 28 bp, Artificial Sequence
  Synthetic
cagtcatttgggaggcaagatgttggca

SEQ ID NO: 5345 - DNA, 28 bp, Artificial Sequence
  Synthetic
cagtcatttgggtattgcacattactaa

SEQ ID NO: 5346 - DNA, 28 bp, Artificial Sequence
  Synthetic
cagtcatttggggtgcattgtagttgca

SEQ ID NO: 5347 - DNA, 28 bp, Artificial Sequence
  Synthetic
cagtcatttgggtggcagtgtcttagct

SEQ ID NO: 5348 - DNA, 28 bp, Artificial Sequence
  Synthetic
cagtcatttgggcaggcagtgtagttag

SEQ ID NO: 5349 - DNA, 28 bp, Artificial Sequence
  Synthetic
cagtcatttgggaggcagtgtagttagc

SEQ ID NO: 5350 - DNA, 28 bp, Artificial Sequence
  Synthetic
cagtcatttgggtaatgcccctaaaaat

SEQ ID NO: 5351 - DNA, 28 bp, Artificial Sequence
  Synthetic
cagtcatttgggaattgcactttagcaa

SEQ ID NO: 5352 - DNA, 28 bp, Artificial Sequence
  Synthetic
cagtcatttgggtttgttcgttcggctc

SEQ ID NO: 5353 - DNA, 28 bp, Artificial Sequence
  Synthetic
cagtcatttgggagatcagaaggtgatt

SEQ ID NO: 5354 - DNA, 28 bp, Artificial Sequence
  Synthetic
cagtcatttgggtaatactgtctggtaa

SEQ ID NO: 5355 - DNA, 28 bp, Artificial Sequence
  Synthetic
cagtcatttgggtggcagtgtatgttag

SEQ ID NO: 5356 - DNA, 28 bp, Artificial Sequence
  Synthetic
cagtcatttgggaaaccgttaccattac

SEQ ID NO: 5357 - DNA, 28 bp, Artificial Sequence
  Synthetic
cagtcatttgggtatgtgcccttggact

SEQ ID NO: 5358 - DNA, 28 bp, Artificial Sequence
  Synthetic
cagtcatttgggcaggctggttagatgg

SEQ ID NO: 5359 - DNA, 28 bp, Artificial Sequence
  Synthetic
cagtcatttgggcctgcattgtacacac

SEQ ID NO: 5360 - DNA, 28 bp, Artificial Sequence
  Synthetic
cagtcatttgggatatatacacacacac

SEQ ID NO: 5361 - DNA, 28 bp, Artificial Sequence
  Synthetic
cagtcatttgggagtgacatcatatgta

SEQ ID NO: 5362 - DNA, 28 bp, Artificial Sequence
  Synthetic
cagtcatttgggcaacctggaggactcc

SEQ ID NO: 5363 - DNA, 28 bp, Artificial Sequence
  Synthetic
cagtcatttgggttaagacttgtagtga

SEQ ID NO: 5364 - DNA, 28 bp, Artificial Sequence
  Synthetic
cagtcatttgggtggaagactagtgatt

SEQ ID NO: 5365 - DNA, 28 bp, Artificial Sequence
  Synthetic
cagtcatttggggcagagctgcagatgg

SEQ ID NO: 5366 - DNA, 28 bp, Artificial Sequence
  Synthetic
cagtcatttgggtggaagactagtgatt

SEQ ID NO: 5367 - DNA, 28 bp, Artificial Sequence
  Synthetic
cagtcatttgggtctttggttatctagc

SEQ ID NO: 5368 - DNA, 28 bp, Artificial Sequence
  Synthetic
cagtcatttgggtaaagctagagaaccg

SEQ ID NO: 5369 - DNA, 28 bp, Artificial Sequence
  Synthetic
cagtcatttgggtattgcacttgtcccg

SEQ ID NO: 5370 - DNA, 28 bp, Artificial Sequence
  Synthetic
cagtcatttgggaacccgtagatccgat

SEQ ID NO: 5371 - DNA, 28 bp, Artificial Sequence
  Synthetic
cagtcatttgggaacccgtagatccgaa

SEQ ID NO: 5372 - DNA, 28 bp, Artificial Sequence
  Synthetic
cagtcatttgggtacagtactgtgataa

SEQ ID NO: 5373 - DNA, 28 bp, Artificial Sequence
  Synthetic
cagtcatttgggagcagcattgtacagg

SEQ ID NO: 5374 - DNA, 28 bp, Artificial Sequence
  Synthetic
cagtcatttgggtcaaatgctcagactc

SEQ ID NO: 5375 - DNA, 28 bp, Artificial Sequence
  Synthetic
cagtcatttgggaaaagtgcttacagtg

SEQ ID NO: 5376 - DNA, 28 bp, Artificial Sequence
  Synthetic
cagtcatttgggtaaagtgctgacagtg

SEQ ID NO: 5377 - DNA, 28 bp, Artificial Sequence
  Synthetic
cagtcatttgggagcagcattgtacagg

SEQ ID NO: 5378 - DNA, 28 bp, Artificial Sequence
  Synthetic
cagtcatttgggtaccctgtagatccga

SEQ ID NO: 5379 - DNA, 28 bp, Artificial Sequence
  Synthetic
cagtcatttgggtaccctgtagaaccga

SEQ ID NO: 5380 - DNA, 28 bp, Artificial Sequence
  Synthetic
cagtcatttgggttaaggcacgcggtga

SEQ ID NO: 5381 - DNA, 28 bp, Artificial Sequence
  Synthetic
cagtcatttgggtccctgagaccctaac

SEQ ID NO: 5382 - DNA, 28 bp, Artificial Sequence
  Synthetic
cagtcatttgggcagtgcaatgttaaaa

SEQ ID NO: 5383 - DNA, 28 bp, Artificial Sequence
  Synthetic
cagtcatttgggttggtccccttcaacc

SEQ ID NO: 5384 - DNA, 28 bp, Artificial Sequence
  Synthetic
cagtcatttgggtgtgactggttgacca

SEQ ID NO: 5385 - DNA, 28 bp, Artificial Sequence
  Synthetic
cagtcatttgggtatggctttttattcc

SEQ ID NO: 5386 - DNA, 28 bp, Artificial Sequence
  Synthetic
cagtcatttgggactccatttgttttga

SEQ ID NO: 5387 - DNA, 28 bp, Artificial Sequence
  Synthetic
cagtcatttgggaacactgtctggtaaa

SEQ ID NO: 5388 - DNA, 28 bp, Artificial Sequence
  Synthetic
cagtcatttgggtgagatgaagcactgt

SEQ ID NO: 5389 - DNA, 28 bp, Artificial Sequence
  Synthetic
cagtcatttggggtccagttttcccagg

SEQ ID NO: 5390 - DNA, 28 bp, Artificial Sequence
  Synthetic
cagtcatttgggttgcatagtcacaaaa

SEQ ID NO: 5391 - DNA, 28 bp, Artificial Sequence
  Synthetic
cagtcatttgggtaggttatccgtgttg

SEQ ID NO: 5392 - DNA, 28 bp, Artificial Sequence
  Synthetic
cagtcatttgggtagcagcacataatgg

SEQ ID NO: 5393 - DNA, 28 bp, Artificial Sequence
  Synthetic
cagtcatttgggtagcagcacatcatgg

SEQ ID NO: 5394 - DNA, 28 bp, Artificial Sequence
  Synthetic
cagtcatttgggtagcagcacgtaaata

SEQ ID NO: 5395 - DNA, 28 bp, Artificial Sequence
  Synthetic
cagtcatttgggactgcagtgaaggcac

SEQ ID NO: 5396 - DNA, 28 bp, Artificial Sequence
  Synthetic
cagtcatttgggcaaagtgcttacagtg

SEQ ID NO: 5397 - DNA, 28 bp, Artificial Sequence
  Synthetic
cagtcatttgggtaaggtgcatctagtg

SEQ ID NO: 5398 - DNA, 28 bp, Artificial Sequence
  Synthetic
cagtcatttgggaacattcaacgctgtc

SEQ ID NO: 5399 - DNA, 28 bp, Artificial Sequence
  Synthetic
cagtcatttgggaccatcgaccgttgat

SEQ ID NO: 5400 - DNA, 28 bp, Artificial Sequence
  Synthetic
cagtcatttgggaacattcattgctgtc

SEQ ID NO: 5401 - DNA, 28 bp, Artificial Sequence
  Synthetic
cagtcatttgggaacattcaacctgtcg

SEQ ID NO: 5402 - DNA, 28 bp, Artificial Sequence
  Synthetic
cagtcatttgggtatggcactggtagaa

SEQ ID NO: 5403 - DNA, 28 bp, Artificial Sequence
  Synthetic
cagtcatttgggcaaagaattctccttt

SEQ ID NO: 5404 - DNA, 28 bp, Artificial Sequence
  Synthetic
cagtcatttgggtcgtgtcttgtgttgc

SEQ ID NO: 5405 - DNA, 28 bp, Artificial Sequence
  Synthetic
cagtcatttgggtgatatgtttgatata

SEQ ID NO: 5406 - DNA, 28 bp, Artificial Sequence
  Synthetic
cagtcatttgggtgtaacagcaactcca

SEQ ID NO: 5407 - DNA, 28 bp, Artificial Sequence
  Synthetic
cagtcatttgggtagcagcacagaaata

SEQ ID NO: 5408 - DNA, 28 bp, Artificial Sequence
  Synthetic
cagtcatttgggtaggtagtttcatgtt

SEQ ID NO: 5409 - DNA, 28 bp, Artificial Sequence
  Synthetic
cagtcatttgggggtccagaggggagat

SEQ ID NO: 5410 - DNA, 28 bp, Artificial Sequence
  Synthetic
cagtcatttgggcccagtgttcagacta

SEQ ID NO: 5411 - DNA, 28 bp, Artificial Sequence
  Synthetic
cagtcatttgggtgtgcaaatctatgca

SEQ ID NO: 5412 - DNA, 28 bp, Artificial Sequence
  Synthetic
cagtcatttgggtgtgcaaatccatgca

SEQ ID NO: 5413 - DNA, 28 bp, Artificial Sequence
  Synthetic
cagtcatttgggtaaagtgcttatagtg

SEQ ID NO: 5414 - DNA, 28 bp, Artificial Sequence
  Synthetic
cagtcatttgggaatactgccgggtaat

SEQ ID NO: 5415 - DNA, 28 bp, Artificial Sequence
  Synthetic
cagtcatttgggttccctttgtcatcct

SEQ ID NO: 5416 - DNA, 28 bp, Artificial Sequence
  Synthetic
cagtcatttgggtccttcattccaccgg

SEQ ID NO: 5417 - DNA, 28 bp, Artificial Sequence
  Synthetic
cagtcatttgggtagcttatcagactga

SEQ ID NO: 5418 - DNA, 28 bp, Artificial Sequence
  Synthetic
cagtcatttgggacagcaggcacagaca

SEQ ID NO: 5419 - DNA, 28 bp, Artificial Sequence
  Synthetic
cagtcatttgggatgacctatgaattga

SEQ ID NO: 5420 - DNA, 28 bp, Artificial Sequence
  Synthetic
cagtcatttgggtaatctcagctggcaa

SEQ ID NO: 5421 - DNA, 28 bp, Artificial Sequence
  Synthetic
cagtcatttgggtactgcatcaggaact

SEQ ID NO: 5422 - DNA, 28 bp, Artificial Sequence
  Synthetic
cagtcatttgggttgtgcttgatctaac

SEQ ID NO: 5423 - DNA, 28 bp, Artificial Sequence
  Synthetic
cagtcatttgggtgattgtccaaacgca

SEQ ID NO: 5424 - DNA, 28 bp, Artificial Sequence
  Synthetic
cagtcatttgggccacaccgtgtctgac

SEQ ID NO: 5425 - DNA, 28 bp, Artificial Sequence
  Synthetic
cagtcatttgggagctacattgtctgct

SEQ ID NO: 5426 - DNA, 28 bp, Artificial Sequence
  Synthetic
cagtcatttgggtgtcagtttgtcaaat

SEQ ID NO: 5427 - DNA, 28 bp, Artificial Sequence
  Synthetic
cagtcatttgggcaagtcactagtggtt

SEQ ID NO: 5428 - DNA, 28 bp, Artificial Sequence
  Synthetic
cagtcatttgggatcacattgccaggga

SEQ ID NO: 5429 - DNA, 28 bp, Artificial Sequence
  Synthetic
cagtcatttgggtggctcagttcagcag

SEQ ID NO: 5430 - DNA, 28 bp, Artificial Sequence
  Synthetic
cagtcatttgggcattgcacttgtctcg

SEQ ID NO: 5431 - DNA, 28 bp, Artificial Sequence
  Synthetic
cagtcatttgggttcaagtaatccagga

SEQ ID NO: 5432 - DNA, 28 bp, Artificial Sequence
  Synthetic
cagtcatttgggttcacagtggctaagt

SEQ ID NO: 5433 - DNA, 28 bp, Artificial Sequence
  Synthetic
cagtcatttgggaaggagctcacagtct

SEQ ID NO: 5434 - DNA, 28 bp, Artificial Sequence
  Synthetic
cagtcatttgggctagcaccatctgaaa

SEQ ID NO: 5435 - DNA, 28 bp, Artificial Sequence
  Synthetic
cagtcatttgggtagcaccatttgaaat

SEQ ID NO: 5436 - DNA, 28 bp, Artificial Sequence
  Synthetic
cagtcatttgggctttcagtcggatgtt

SEQ ID NO: 5437 - DNA, 28 bp, Artificial Sequence
  Synthetic
cagtcatttgggtgtaaacatcctcgac

SEQ ID NO: 5438 - DNA, 28 bp, Artificial Sequence
  Synthetic
cagtcatttgggtgtaaacatcctacac

SEQ ID NO: 5439 - DNA, 28 bp, Artificial Sequence
  Synthetic
cagtcatttgggtgtaaacatccccgac

SEQ ID NO: 5440 - DNA, 28 bp, Artificial Sequence
  Synthetic
cagtcatttgggggcaagatgctggcat

SEQ ID NO: 5441 - DNA, 28 bp, Artificial Sequence
  Synthetic
cagtcatttgggtattgcacattactaa

SEQ ID NO: 5442 - DNA, 28 bp, Artificial Sequence
  Synthetic
cagtcatttggggtgcattgtagttgca

SEQ ID NO: 5443 - DNA, 28 bp, Artificial Sequence
  Synthetic
cagtcatttgggtggcagtgtcttagct

SEQ ID NO: 5444 - DNA, 28 bp, Artificial Sequence
  Synthetic
cagtcatttgggtggaagactagtgatt

SEQ ID NO: 5445 - DNA, 28 bp, Artificial Sequence
  Synthetic
cagtcatttgggtctttggttatctagc

SEQ ID NO: 5446 - DNA, 28 bp, Artificial Sequence
  Synthetic
cagtcatttgggtattgcacttgtcccg

SEQ ID NO: 5447 - DNA, 28 bp, Artificial Sequence
  Synthetic
cagtcatttgggaaagtgctgttcgtgc

SEQ ID NO: 5448 - DNA, 28 bp, Artificial Sequence
  Synthetic
cagtcatttgggttcaacgggtatttat

SEQ ID NO: 5449 - DNA, 28 bp, Artificial Sequence
  Synthetic
cagtcatttgggtttggcactagcacat

SEQ ID NO: 5450 - DNA, 28 bp, Artificial Sequence
  Synthetic
cagtcatttgggtgaggtagtaagttgt

SEQ ID NO: 5451 - DNA, 28 bp, Artificial Sequence
  Synthetic
cagtcatttgggaacccgtagatccgat

SEQ ID NO: 5452 - DNA, 28 bp, Artificial Sequence
  Synthetic
cagtcatttgggtgacagaagagagtga

SEQ ID NO: 5453 - DNA, 28 bp, Artificial Sequence
  Synthetic
cagtcatttgggtgacagaagagagaga

SEQ ID NO: 5454 - DNA, 28 bp, Artificial Sequence
  Synthetic
cagtcatttgggttgacagaagatagag

SEQ ID NO: 5455 - DNA, 28 bp, Artificial Sequence
  Synthetic
cagtcatttgggttgacagaagatagag

SEQ ID NO: 5456 - DNA, 28 bp, Artificial Sequence
  Synthetic
cagtcatttgggttgacagaagatagag

SEQ ID NO: 5457 - DNA, 28 bp, Artificial Sequence
  Synthetic
cagtcatttgggtttggattgaagggag

SEQ ID NO: 5458 - DNA, 28 bp, Artificial Sequence
  Synthetic
cagtcatttgggtgcctggctccctgta

SEQ ID NO: 5459 - DNA, 28 bp, Artificial Sequence
  Synthetic
cagtcatttgggtcggaccaggcttcat

SEQ ID NO: 5460 - DNA, 28 bp, Artificial Sequence
  Synthetic
cagtcatttgggtcggaccaggcttcat

SEQ ID NO: 5461 - DNA, 28 bp, Artificial Sequence
  Synthetic
cagtcatttgggtgaagctgccagcatg

SEQ ID NO: 5462 - DNA, 28 bp, Artificial Sequence
  Synthetic
cagtcatttgggtgaagctgccagcatg

SEQ ID NO: 5463 - DNA, 28 bp, Artificial Sequence
  Synthetic
cagtcatttgggtcgcttggtgcaggtc

SEQ ID NO: 5464 - DNA, 28 bp, Artificial Sequence
  Synthetic
cagtcatttgggcagccaaggatgactt

SEQ ID NO: 5465 - DNA, 28 bp, Artificial Sequence
  Synthetic
cagtcatttgggagaatcttgatgatgc

SEQ ID NO: 5466 - DNA, 28 bp, Artificial Sequence
  Synthetic
cagtcatttgggagaatcttgatgatgc

SEQ ID NO: 5467 - DNA, 28 bp, Artificial Sequence
  Synthetic
cagtcatttgggttggactgaagggagc

SEQ ID NO: 5468 - DNA, 28 bp, Artificial Sequence
  Synthetic
cagtcatttgggttggactgaagggagc

SEQ ID NO: 5469 - DNA, 28 bp, Artificial Sequence
  Synthetic
cagtcatttgggttggactgaaaggagc

SEQ ID NO: 5470 - DNA, 28 bp, Artificial Sequence
  Synthetic
cagtcatttgggttccacagctttcttg

SEQ ID NO: 5471 - DNA, 28 bp, Artificial Sequence
  Synthetic
cagtcatttgggttccacagctttcttg

SEQ ID NO: 5472 - DNA, 28 bp, Artificial Sequence
  Synthetic
cagtcatttgggtgtgttctcaggtcac

SEQ ID NO: 5473 - DNA, 28 bp, Artificial Sequence
  Synthetic
cagtcatttgggtgtgttctcaggtcac

SEQ ID NO: 5474 - DNA, 28 bp, Artificial Sequence
  Synthetic
cagtcatttgggaagtgacggtgagatc

SEQ ID NO: 5475 - DNA, 28 bp, Artificial Sequence
  Synthetic
cagtcatttgggtcgtcctccccttctt

SEQ ID NO: 5476 - DNA, 28 bp, Artificial Sequence
  Synthetic
cagtcatttgggtaactagccttcccgt

SEQ ID NO: 5477 - DNA, 28 bp, Artificial Sequence
  Synthetic
cagtcatttgggtcaccagaatgctagt

SEQ ID NO: 5478 - DNA, 28 bp, Artificial Sequence
  Synthetic
cagtcatttgggtcgttgaagacacctg

SEQ ID NO: 5479 - DNA, 28 bp, Artificial Sequence
  Synthetic
cagtcatttgggggggatgggctggcgc

SEQ ID NO: 5480 - DNA, 28 bp, Artificial Sequence
  Synthetic
cagtcatttgggtgcgtctcggcctcgt

SEQ ID NO: 5481 - DNA, 28 bp, Artificial Sequence
  Synthetic
cagtcatttgggaaccgctcagtggctc

SEQ ID NO: 5482 - DNA, 28 bp, Artificial Sequence
  Synthetic
cagtcatttgggatccacttggagagct

SEQ ID NO: 5483 - DNA, 28 bp, Artificial Sequence
  Synthetic
cagtcatttgggagcggtctgttcaggt

SEQ ID NO: 5484 - DNA, 28 bp, Artificial Sequence
  Synthetic
cagtcatttggggattgtgcccggaccg

SEQ ID NO: 5485 - DNA, 28 bp, Artificial Sequence
  Synthetic
cagtcatttgggcgacatggacgtgcag

SEQ ID NO: 5486 - DNA, 28 bp, Artificial Sequence
  Synthetic
cagtcatttgggtgacaagcctgacgag

SEQ ID NO: 5487 - DNA, 28 bp, Artificial Sequence
  Synthetic
cagtcatttgggttatgataggtgtgac

SEQ ID NO: 5488 - DNA, 28 bp, Artificial Sequence
  Synthetic
cagtcatttgggtgaggtagtaggttgt

SEQ ID NO: 5489 - DNA, 28 bp, Artificial Sequence
  Synthetic
cagtcatttgggtgaggtagtaggttgt

SEQ ID NO: 5490 - DNA, 28 bp, Artificial Sequence
  Synthetic
cagtcatttgggtgaggtagtaggttgt

SEQ ID NO: 5491 - DNA, 28 bp, Artificial Sequence
  Synthetic
cagtcatttgggagaggtagtaggttgc

SEQ ID NO: 5492 - DNA, 28 bp, Artificial Sequence
  Synthetic
cagtcatttgggtgaggtaggaggttgt

SEQ ID NO: 5493 - DNA, 28 bp, Artificial Sequence
  Synthetic
cagtcatttgggtgaggtagtagattgt

SEQ ID NO: 5494 - DNA, 28 bp, Artificial Sequence
  Synthetic
cagtcatttgggtgaggtagtagtttgt

SEQ ID NO: 5495 - DNA, 28 bp, Artificial Sequence
  Synthetic
cagtcatttgggtgaggtagtagtttgt

SEQ ID NO: 5496 - DNA, 28 bp, Artificial Sequence
  Synthetic
cagtcatttgggtggaatgtaaagaagt

SEQ ID NO: 5497 - DNA, 28 bp, Artificial Sequence
  Synthetic
cagtcatttgggaacccgtagatccgaa

SEQ ID NO: 5498 - DNA, 28 bp, Artificial Sequence
  Synthetic
cagtcatttgggtacagtactgtgataa

SEQ ID NO: 5499 - DNA, 28 bp, Artificial Sequence
  Synthetic
cagtcatttgggagcagcattgtacagg

SEQ ID NO: 5500 - DNA, 28 bp, Artificial Sequence
  Synthetic
cagtcatttgggtcaaatgctcagactc

SEQ ID NO: 5501 - DNA, 28 bp, Artificial Sequence
  Synthetic
cagtcatttgggaaaagtgcttacagtg

SEQ ID NO: 5502 - DNA, 28 bp, Artificial Sequence
  Synthetic
cagtcatttgggtaaagtgctgacagtg

SEQ ID NO: 5503 - DNA, 28 bp, Artificial Sequence
  Synthetic
cagtcatttgggagcagcattgtacagg

SEQ ID NO: 5504 - DNA, 28 bp, Artificial Sequence
  Synthetic
cagtcatttgggtaccctgtagatccga

SEQ ID NO: 5505 - DNA, 28 bp, Artificial Sequence
  Synthetic
cagtcatttgggtaccctgtagaaccga

SEQ ID NO: 5506 - DNA, 28 bp, Artificial Sequence
  Synthetic
cagtcatttgggtggagtgtgacaatgg

SEQ ID NO: 5507 - DNA, 28 bp, Artificial Sequence
  Synthetic
cagtcatttgggttaaggcacgcggtga

SEQ ID NO: 5508 - DNA, 28 bp, Artificial Sequence
  Synthetic
cagtcatttgggtccctgagacccttta

SEQ ID NO: 5509 - DNA, 28 bp, Artificial Sequence
  Synthetic
cagtcatttgggtccctgagaccctaac

SEQ ID NO: 5510 - DNA, 28 bp, Artificial Sequence
  Synthetic
cagtcatttgggtcgtaccgtgagtaat

SEQ ID NO: 5511 - DNA, 28 bp, Artificial Sequence
  Synthetic
cagtcatttgggcattattacttttggt

SEQ ID NO: 5512 - DNA, 28 bp, Artificial Sequence
  Synthetic
cagtcatttgggtcggatccgtctgagc

SEQ ID NO: 5513 - DNA, 28 bp, Artificial Sequence
  Synthetic
cagtcatttgggtcacagtgaaccggtc

SEQ ID NO: 5514 - DNA, 28 bp, Artificial Sequence
  Synthetic
cagtcatttgggtcacagtgaaccggtc

SEQ ID NO: 5515 - DNA, 28 bp, Artificial Sequence
  Synthetic
cagtcatttgggctttttgcggtctggg

SEQ ID NO: 5516 - DNA, 28 bp, Artificial Sequence
  Synthetic
cagtcatttgggcagtgcaatgttaaaa

SEQ ID NO: 5517 - DNA, 28 bp, Artificial Sequence
  Synthetic
cagtcatttgggcagtgcaatgatgaaa

SEQ ID NO: 5518 - DNA, 28 bp, Artificial Sequence
  Synthetic
cagtcatttgggtaacagtctacagcca

SEQ ID NO: 5519 - DNA, 28 bp, Artificial Sequence
  Synthetic
cagtcatttgggttggtccccttcaacc

SEQ ID NO: 5520 - DNA, 28 bp, Artificial Sequence
  Synthetic
cagtcatttgggttggtccccttcaacc

SEQ ID NO: 5521 - DNA, 28 bp, Artificial Sequence
  Synthetic
cagtcatttgggtgtgactggttgacca

SEQ ID NO: 5522 - DNA, 28 bp, Artificial Sequence
  Synthetic
cagtcatttgggtatggctttttattcc

SEQ ID NO: 5523 - DNA, 28 bp, Artificial Sequence
  Synthetic
cagtcatttgggtatggcttttcattcc

SEQ ID NO: 5524 - DNA, 28 bp, Artificial Sequence
  Synthetic
cagtcatttgggactccatttgttttga

SEQ ID NO: 5525 - DNA, 28 bp, Artificial Sequence
  Synthetic
cagtcatttgggtattgcttaagaatac

SEQ ID NO: 5526 - DNA, 28 bp, Artificial Sequence
  Synthetic
cagtcatttgggagctggtgttgtgaat

SEQ ID NO: 5527 - DNA, 28 bp, Artificial Sequence
  Synthetic
cagtcatttgggtctacagtgcacgtgt

SEQ ID NO: 5528 - DNA, 28 bp, Artificial Sequence
  Synthetic
cagtcatttgggagtggttttaccctat

SEQ ID NO: 5529 - DNA, 28 bp, Artificial Sequence
  Synthetic
cagtcatttgggtaacactgtctggtaa

SEQ ID NO: 5530 - DNA, 28 bp, Artificial Sequence
  Synthetic
cagtcatttgggtgtagtgtttcctact

SEQ ID NO: 5531 - DNA, 28 bp, Artificial Sequence
  Synthetic
cagtcatttgggcataaagtagaaagca

SEQ ID NO: 5532 - DNA, 28 bp, Artificial Sequence
  Synthetic
cagtcatttgggtgagatgaagcactgt

SEQ ID NO: 5533 - DNA, 28 bp, Artificial Sequence
  Synthetic
cagtcatttgggtacagtatagatgatg

SEQ ID NO: 5534 - DNA, 28 bp, Artificial Sequence
  Synthetic
cagtcatttggggtccagttttcccagg

SEQ ID NO: 5535 - DNA, 28 bp, Artificial Sequence
  Synthetic
cagtcatttgggtgagaactgaattcca

SEQ ID NO: 5536 - DNA, 28 bp, Artificial Sequence
  Synthetic
cagtcatttgggtgagaactgaattcca

SEQ ID NO: 5537 - DNA, 28 bp, Artificial Sequence
  Synthetic
cagtcatttggggtgtgtggaaatgctt

SEQ ID NO: 5538 - DNA, 28 bp, Artificial Sequence
  Synthetic
cagtcatttgggtcagtgcactacagaa

SEQ ID NO: 5539 - DNA, 28 bp, Artificial Sequence
  Synthetic
cagtcatttgggtcagtgcatcacagaa

SEQ ID NO: 5540 - DNA, 28 bp, Artificial Sequence
  Synthetic
cagtcatttgggtctggctccgtgtctt

SEQ ID NO: 5541 - DNA, 28 bp, Artificial Sequence
  Synthetic
cagtcatttgggtctcccaacccttgta

SEQ ID NO: 5542 - DNA, 28 bp, Artificial Sequence
  Synthetic
cagtcatttgggactagactgaagctcc

SEQ ID NO: 5543 - DNA, 28 bp, Artificial Sequence
  Synthetic
cagtcatttgggtcagtgcatgacagaa

SEQ ID NO: 5544 - DNA, 28 bp, Artificial Sequence
  Synthetic
cagtcatttgggttgcatagtcacaaaa

SEQ ID NO: 5545 - DNA, 28 bp, Artificial Sequence
  Synthetic
cagtcatttgggtaggttatccgtgttg

SEQ ID NO: 5546 - DNA, 28 bp, Artificial Sequence
  Synthetic
cagtcatttgggaatcatacacggttga

SEQ ID NO: 5547 - DNA, 28 bp, Artificial Sequence
  Synthetic
cagtcatttgggttaatgctaatcgtga

SEQ ID NO: 5548 - DNA, 28 bp, Artificial Sequence
  Synthetic
cagtcatttgggtagcagcacataatgg

SEQ ID NO: 5549 - DNA, 28 bp, Artificial Sequence
  Synthetic
cagtcatttgggtagcagcacatcatgg

SEQ ID NO: 5550 - DNA, 28 bp, Artificial Sequence
  Synthetic
cagtcatttgggtagcagcacgtaaata

SEQ ID NO: 5551 - DNA, 28 bp, Artificial Sequence
  Synthetic
cagtcatttgggactgcagtgaaggcac

SEQ ID NO: 5552 - DNA, 28 bp, Artificial Sequence
  Synthetic
cagtcatttgggcaaagtgcttacagtg

SEQ ID NO: 5553 - DNA, 28 bp, Artificial Sequence
  Synthetic
cagtcatttgggaacattcaacgctgtc

SEQ ID NO: 5554 - DNA, 28 bp, Artificial Sequence
  Synthetic
cagtcatttgggaccatcgaccgttgat

SEQ ID NO: 5555 - DNA, 28 bp, Artificial Sequence
  Synthetic
cagtcatttgggaacattcattgctgtc

SEQ ID NO: 5556 - DNA, 28 bp, Artificial Sequence
  Synthetic
cagtcatttgggaacattcaacctgtcg

SEQ ID NO: 5557 - DNA, 28 bp, Artificial Sequence
  Synthetic
cagtcatttgggaacattcattgttgtc

SEQ ID NO: 5558 - DNA, 28 bp, Artificial Sequence
  Synthetic
cagtcatttgggtttggcaatggtagaa

SEQ ID NO: 5559 - DNA, 28 bp, Artificial Sequence
  Synthetic
cagtcatttgggtggttctagacttgcc

SEQ ID NO: 5560 - DNA, 28 bp, Artificial Sequence
  Synthetic
cagtcatttgggtatggcactggtagaa

SEQ ID NO: 5561 - DNA, 28 bp, Artificial Sequence
  Synthetic
cagtcatttgggtggacggagaactgat

SEQ ID NO: 5562 - DNA, 28 bp, Artificial Sequence
  Synthetic
cagtcatttgggtggagagaaaggcagt

SEQ ID NO: 5563 - DNA, 28 bp, Artificial Sequence
  Synthetic
cagtcatttgggcaaagaattctccttt

SEQ ID NO: 5564 - DNA, 28 bp, Artificial Sequence
  Synthetic
cagtcatttgggtcgtgtcttgtgttgc

SEQ ID NO: 5565 - DNA, 28 bp, Artificial Sequence
  Synthetic
cagtcatttgggcatcccttgcatggtg

SEQ ID NO: 5566 - DNA, 28 bp, Artificial Sequence
  Synthetic
cagtcatttggggtgcctactgagctga

SEQ ID NO: 5567 - DNA, 28 bp, Artificial Sequence
  Synthetic
cagtcatttgggtaaggtgcatctagtg

SEQ ID NO: 5568 - DNA, 28 bp, Artificial Sequence
  Synthetic
cagtcatttgggactgccctaagtgctc

SEQ ID NO: 5569 - DNA, 28 bp, Artificial Sequence
  Synthetic
cagtcatttgggtaaggtgcatctagtg

SEQ ID NO: 5570 - DNA, 28 bp, Artificial Sequence
  Synthetic
cagtcatttgggtgatatgtttgatata

SEQ ID NO: 5571 - DNA, 28 bp, Artificial Sequence
  Synthetic
cagtcatttgggcaacggaatcccaaaa

SEQ ID NO: 5572 - DNA, 28 bp, Artificial Sequence
  Synthetic
cagtcatttggggctgcgcttggatttc

SEQ ID NO: 5573 - DNA, 28 bp, Artificial Sequence
  Synthetic
cagtcatttgggctgacctatgaattga

SEQ ID NO: 5574 - DNA, 28 bp, Artificial Sequence
  Synthetic
cagtcatttgggaactggcctacaaagt

SEQ ID NO: 5575 - DNA, 28 bp, Artificial Sequence
  Synthetic
cagtcatttgggaactggccctcaaagt

SEQ ID NO: 5576 - DNA, 28 bp, Artificial Sequence
  Synthetic
cagtcatttgggtgtaacagcaactcca

SEQ ID NO: 5577 - DNA, 28 bp, Artificial Sequence
  Synthetic
cagtcatttgggtagcagcacagaaata

SEQ ID NO: 5578 - DNA, 28 bp, Artificial Sequence
  Synthetic
cagtcatttgggtaggtagtttcatgtt

SEQ ID NO: 5579 - DNA, 28 bp, Artificial Sequence
  Synthetic
cagtcatttgggtaggtagtttcctgtt

SEQ ID NO: 5580 - DNA, 28 bp, Artificial Sequence
  Synthetic
cagtcatttgggttcaccaccttctcca

SEQ ID NO: 5581 - DNA, 28 bp, Artificial Sequence
  Synthetic
cagtcatttgggggtccagaggggagat

SEQ ID NO: 5582 - DNA, 28 bp, Artificial Sequence
  Synthetic
cagtcatttgggcccagtgttcagacta

SEQ ID NO: 5583 - DNA, 28 bp, Artificial Sequence
  Synthetic
cagtcatttgggtacagtagtctgcaca

SEQ ID NO: 5584 - DNA, 28 bp, Artificial Sequence
  Synthetic
cagtcatttgggcccagtgtttagacta

SEQ ID NO: 5585 - DNA, 28 bp, Artificial Sequence
  Synthetic
cagtcatttgggtgtgcaaatctatgca

SEQ ID NO: 5586 - DNA, 28 bp, Artificial Sequence
  Synthetic
cagtcatttgggtgtgcaaatccatgca

SEQ ID NO: 5587 - DNA, 28 bp, Artificial Sequence
  Synthetic
cagtcatttgggtaacactgtctggtaa

SEQ ID NO: 5588 - DNA, 28 bp, Artificial Sequence
  Synthetic
cagtcatttgggcatcttaccggacagt

SEQ ID NO: 5589 - DNA, 28 bp, Artificial Sequence
  Synthetic
cagtcatttgggtaatactgcctggtaa

SEQ ID NO: 5590 - DNA, 28 bp, Artificial Sequence
  Synthetic
cagtcatttgggtaatactgccgggtaa

SEQ ID NO: 5591 - DNA, 28 bp, Artificial Sequence
  Synthetic
cagtcatttgggagaggtatagggcatg

SEQ ID NO: 5592 - DNA, 28 bp, Artificial Sequence
  Synthetic
cagtcatttgggtttcctatgcatatac

SEQ ID NO: 5593 - DNA, 28 bp, Artificial Sequence
  Synthetic
cagtcatttggggtgaaatgtttaggac

SEQ ID NO: 5594 - DNA, 28 bp, Artificial Sequence
  Synthetic
cagtcatttgggttccctttgtcatcct

SEQ ID NO: 5595 - DNA, 28 bp, Artificial Sequence
  Synthetic
cagtcatttgggtccttcattccaccgg

SEQ ID NO: 5596 - DNA, 28 bp, Artificial Sequence
  Synthetic
cagtcatttgggtggaatgtaaggaagt

SEQ ID NO: 5597 - DNA, 28 bp, Artificial Sequence
  Synthetic
cagtcatttgggataagacgagcaaaaa

SEQ ID NO: 5598 - DNA, 28 bp, Artificial Sequence
  Synthetic
cagtcatttgggtaaagtgcttatagtg

SEQ ID NO: 5599 - DNA, 28 bp, Artificial Sequence
  Synthetic
cagtcatttgggcaaagtgctcatagtg

SEQ ID NO: 5600 - DNA, 28 bp, Artificial Sequence
  Synthetic
cagtcatttgggtagcttatcagactga

SEQ ID NO: 5601 - DNA, 28 bp, Artificial Sequence
  Synthetic
cagtcatttgggctgtgcgtgtgacagc

SEQ ID NO: 5602 - DNA, 28 bp, Artificial Sequence
  Synthetic
cagtcatttgggttccctttgtcatcct

SEQ ID NO: 5603 - DNA, 28 bp, Artificial Sequence
  Synthetic
cagtcatttgggtaacagtctccagtca

SEQ ID NO: 5604 - DNA, 28 bp, Artificial Sequence
  Synthetic
cagtcatttgggacagcaggcacagaca

SEQ ID NO: 5605 - DNA, 28 bp, Artificial Sequence
  Synthetic
cagtcatttgggatgacctatgaattga

SEQ ID NO: 5606 - DNA, 28 bp, Artificial Sequence
  Synthetic
cagtcatttgggtaatctcagctggcaa

SEQ ID NO: 5607 - DNA, 28 bp, Artificial Sequence
  Synthetic
cagtcatttgggtactgcatcaggaact

SEQ ID NO: 5608 - DNA, 28 bp, Artificial Sequence
  Synthetic
cagtcatttgggttgtgcttgatctaac

SEQ ID NO: 5609 - DNA, 28 bp, Artificial Sequence
  Synthetic
cagtcatttgggtgattgtccaaacgca

SEQ ID NO: 5610 - DNA, 28 bp, Artificial Sequence
  Synthetic
cagtcatttgggaagctgccagttgaag

SEQ ID NO: 5611 - DNA, 28 bp, Artificial Sequence
  Synthetic
cagtcatttgggccacaccgtatctgac

SEQ ID NO: 5612 - DNA, 28 bp, Artificial Sequence
  Synthetic
cagtcatttgggagctacattgtctgct

SEQ ID NO: 5613 - DNA, 28 bp, Artificial Sequence
  Synthetic
cagtcatttgggagctacatctggctac

SEQ ID NO: 5614 - DNA, 28 bp, Artificial Sequence
  Synthetic
cagtcatttgggtgtcagtttgtcaaat

SEQ ID NO: 5615 - DNA, 28 bp, Artificial Sequence
  Synthetic
cagtcatttgggcaagtcactagtggtt

SEQ ID NO: 5616 - DNA, 28 bp, Artificial Sequence
  Synthetic
cagtcatttgggatcacattgccaggga

SEQ ID NO: 5617 - DNA, 28 bp, Artificial Sequence
  Synthetic
cagtcatttgggatcacattgccaggga

SEQ ID NO: 5618 - DNA, 28 bp, Artificial Sequence
  Synthetic
cagtcatttgggtggctcagttcagcag

SEQ ID NO: 5619 - DNA, 28 bp, Artificial Sequence
  Synthetic
cagtcatttgggcattgcacttgtctcg

SEQ ID NO: 5620 - DNA, 28 bp, Artificial Sequence
  Synthetic
cagtcatttgggttcaagtaatccagga

SEQ ID NO: 5621 - DNA, 28 bp, Artificial Sequence
  Synthetic
cagtcatttgggttcaagtaattcagga

SEQ ID NO: 5622 - DNA, 28 bp, Artificial Sequence
  Synthetic
cagtcatttgggttcacagtggctaagt

SEQ ID NO: 5623 - DNA, 28 bp, Artificial Sequence
  Synthetic
cagtcatttgggttcacagtggctaagt

SEQ ID NO: 5624 - DNA, 28 bp, Artificial Sequence
  Synthetic
cagtcatttgggaaggagctcacagtct

SEQ ID NO: 5625 - DNA, 28 bp, Artificial Sequence
  Synthetic
cagtcatttgggagggccccccctcaat

SEQ ID NO: 5626 - DNA, 28 bp, Artificial Sequence
  Synthetic
cagtcatttgggtatgtgggatggtaaa

SEQ ID NO: 5627 - DNA, 28 bp, Artificial Sequence
  Synthetic
cagtcatttgggtggtttaccgtcccac

SEQ ID NO: 5628 - DNA, 28 bp, Artificial Sequence
  Synthetic
cagtcatttgggtagcaccatctgaaat

SEQ ID NO: 5629 - DNA, 28 bp, Artificial Sequence
  Synthetic
cagtcatttgggtagcaccatttgaaat

SEQ ID NO: 5630 - DNA, 28 bp, Artificial Sequence
  Synthetic
cagtcatttgggtagcaccatttgaaat

SEQ ID NO: 5631 - DNA, 28 bp, Artificial Sequence
  Synthetic
cagtcatttgggcagtgcaatagtattg

SEQ ID NO: 5632 - DNA, 28 bp, Artificial Sequence
  Synthetic
cagtcatttgggtaagtgcttccatgtt

SEQ ID NO: 5633 - DNA, 28 bp, Artificial Sequence
  Synthetic
cagtcatttgggtaaacgtggatgtact

SEQ ID NO: 5634 - DNA, 28 bp, Artificial Sequence
  Synthetic
cagtcatttgggtaagtgcttccatgtt

SEQ ID NO: 5635 - DNA, 28 bp, Artificial Sequence
  Synthetic
cagtcatttgggactttaacatggaagt

SEQ ID NO: 5636 - DNA, 28 bp, Artificial Sequence
  Synthetic
cagtcatttgggtaagtgcttccatgtt

SEQ ID NO: 5637 - DNA, 28 bp, Artificial Sequence
  Synthetic
cagtcatttgggtttaacatgggggtac

SEQ ID NO: 5638 - DNA, 28 bp, Artificial Sequence
  Synthetic
cagtcatttgggtaagtgcttccatgtt

SEQ ID NO: 5639 - DNA, 28 bp, Artificial Sequence
  Synthetic
cagtcatttgggctttcagtcggatgtt

SEQ ID NO: 5640 - DNA, 28 bp, Artificial Sequence
  Synthetic
cagtcatttgggtgtaaacatcctcgac

SEQ ID NO: 5641 - DNA, 28 bp, Artificial Sequence
  Synthetic
cagtcatttgggtgtaaacatcctacac

SEQ ID NO: 5642 - DNA, 28 bp, Artificial Sequence
  Synthetic
cagtcatttgggtgtaaacatcctacac

SEQ ID NO: 5643 - DNA, 28 bp, Artificial Sequence
  Synthetic
cagtcatttgggtgtaaacatccccgac

SEQ ID NO: 5644 - DNA, 28 bp, Artificial Sequence
  Synthetic
cagtcatttgggctttcagtcggatgtt

SEQ ID NO: 5645 - DNA, 28 bp, Artificial Sequence
  Synthetic
cagtcatttgggtgtaaacatccttgac

SEQ ID NO: 5646 - DNA, 28 bp, Artificial Sequence
  Synthetic
cagtcatttgggggcaagatgctggcat

SEQ ID NO: 5647 - DNA, 28 bp, Artificial Sequence
  Synthetic
cagtcatttgggtattgcacattactaa

SEQ ID NO: 5648 - DNA, 28 bp, Artificial Sequence
  Synthetic
cagtcatttgggaaaagctgggttgaga

SEQ ID NO: 5649 - DNA, 28 bp, Artificial Sequence
  Synthetic
cagtcatttggggcacattacacggtcg

SEQ ID NO: 5650 - DNA, 28 bp, Artificial Sequence
  Synthetic
cagtcatttgggccactgccccaggtgc

SEQ ID NO: 5651 - DNA, 28 bp, Artificial Sequence
  Synthetic
cagtcatttgggcgcatcccctagggca

SEQ ID NO: 5652 - DNA, 28 bp, Artificial Sequence
  Synthetic
cagtcatttgggcctagtaggtgtccag

SEQ ID NO: 5653 - DNA, 28 bp, Artificial Sequence
  Synthetic
cagtcatttgggcctctgggcccttcct

SEQ ID NO: 5654 - DNA, 28 bp, Artificial Sequence
  Synthetic
cagtcatttgggctggccctctctgccc

SEQ ID NO: 5655 - DNA, 28 bp, Artificial Sequence
  Synthetic
cagtcatttgggaacacacctggttaac

SEQ ID NO: 5656 - DNA, 28 bp, Artificial Sequence
  Synthetic
cagtcatttggggtgcattgtagttgca

SEQ ID NO: 5657 - DNA, 28 bp, Artificial Sequence
  Synthetic
cagtcatttggggcaaagcacacggcct

SEQ ID NO: 5658 - DNA, 28 bp, Artificial Sequence
  Synthetic
cagtcatttggggcccctgggcctatcc

SEQ ID NO: 5659 - DNA, 28 bp, Artificial Sequence
  Synthetic
cagtcatttgggtcaagagcaataacga

SEQ ID NO: 5660 - DNA, 28 bp, Artificial Sequence
  Synthetic
cagtcatttgggtccagctcctatatga

SEQ ID NO: 5661 - DNA, 28 bp, Artificial Sequence
  Synthetic
cagtcatttgggtccagcatcagtgatt

SEQ ID NO: 5662 - DNA, 28 bp, Artificial Sequence
  Synthetic
cagtcatttgggtccctgtcctccagga

SEQ ID NO: 5663 - DNA, 28 bp, Artificial Sequence
  Synthetic
cagtcatttggggtgcattgctgttgca

SEQ ID NO: 5664 - DNA, 28 bp, Artificial Sequence
  Synthetic
cagtcatttgggtccgtctcagttactt

SEQ ID NO: 5665 - DNA, 28 bp, Artificial Sequence
  Synthetic
cagtcatttgggtctcacacagaaatcg

SEQ ID NO: 5666 - DNA, 28 bp, Artificial Sequence
  Synthetic
cagtcatttgggtgctgactcctagtcc

SEQ ID NO: 5667 - DNA, 28 bp, Artificial Sequence
  Synthetic
cagtcatttgggtgtctgcccgcatgcc

SEQ ID NO: 5668 - DNA, 28 bp, Artificial Sequence
  Synthetic
cagtcatttgggtggcagtgtcttagct

SEQ ID NO: 5669 - DNA, 28 bp, Artificial Sequence
  Synthetic
cagtcatttgggtaggcagtgtcattag

SEQ ID NO: 5670 - DNA, 28 bp, Artificial Sequence
  Synthetic
cagtcatttgggaggcagtgtagttagc

SEQ ID NO: 5671 - DNA, 28 bp, Artificial Sequence
  Synthetic
cagtcatttgggttatcagaatctccag

SEQ ID NO: 5672 - DNA, 28 bp, Artificial Sequence
  Synthetic
cagtcatttgggaatccttggaacctag

SEQ ID NO: 5673 - DNA, 28 bp, Artificial Sequence
  Synthetic
cagtcatttgggaattgcacggtatcca

SEQ ID NO: 5674 - DNA, 28 bp, Artificial Sequence
  Synthetic
cagtcatttgggcgggtggatcacgatg

SEQ ID NO: 5675 - DNA, 28 bp, Artificial Sequence
  Synthetic
cagtcatttgggtaatgcccctaaaaat

SEQ ID NO: 5676 - DNA, 28 bp, Artificial Sequence
  Synthetic
cagtcatttgggaattgcactttagcaa

SEQ ID NO: 5677 - DNA, 28 bp, Artificial Sequence
  Synthetic
cagtcatttgggacatagaggaaattcc

SEQ ID NO: 5678 - DNA, 28 bp, Artificial Sequence
  Synthetic
cagtcatttgggaataatacatggttga

SEQ ID NO: 5679 - DNA, 28 bp, Artificial Sequence
  Synthetic
cagtcatttgggagatcgaccgtgttat

SEQ ID NO: 5680 - DNA, 28 bp, Artificial Sequence
  Synthetic
cagtcatttggggcctgctggggtggaa

SEQ ID NO: 5681 - DNA, 28 bp, Artificial Sequence
  Synthetic
cagtcatttggggtgccgccatcttttg

SEQ ID NO: 5682 - DNA, 28 bp, Artificial Sequence
  Synthetic
cagtcatttgggaaagtgctgcgacatt

SEQ ID NO: 5683 - DNA, 28 bp, Artificial Sequence
  Synthetic
cagtcatttggggaagtgcttcgatttt

SEQ ID NO: 5684 - DNA, 28 bp, Artificial Sequence
  Synthetic
cagtcatttgggactcaaaatgggggcg

SEQ ID NO: 5685 - DNA, 28 bp, Artificial Sequence
  Synthetic
cagtcatttgggttataatacaacctga

SEQ ID NO: 5686 - DNA, 28 bp, Artificial Sequence
  Synthetic
cagtcatttgggtttgttcgttcggctc

SEQ ID NO: 5687 - DNA, 28 bp, Artificial Sequence
  Synthetic
cagtcatttgggatcatagaggaaaatc

SEQ ID NO: 5688 - DNA, 28 bp, Artificial Sequence
  Synthetic
cagtcatttgggggtagattctccttct

SEQ ID NO: 5689 - DNA, 28 bp, Artificial Sequence
  Synthetic
cagtcatttgggatcatagaggaaaatc

SEQ ID NO: 5690 - DNA, 28 bp, Artificial Sequence
  Synthetic
cagtcatttgggatcacacaaaggcaac

SEQ ID NO: 5691 - DNA, 28 bp, Artificial Sequence
  Synthetic
cagtcatttgggctcctgactccaggtc

SEQ ID NO: 5692 - DNA, 28 bp, Artificial Sequence
  Synthetic
cagtcatttgggtggtagactatggaac

SEQ ID NO: 5693 - DNA, 28 bp, Artificial Sequence
  Synthetic
cagtcatttgggtatgtaatatggtcca

SEQ ID NO: 5694 - DNA, 28 bp, Artificial Sequence
  Synthetic
cagtcatttgggtggttgaccatagaac

SEQ ID NO: 5695 - DNA, 28 bp, Artificial Sequence
  Synthetic
cagtcatttgggtatacaagggcaagct

SEQ ID NO: 5696 - DNA, 28 bp, Artificial Sequence
  Synthetic
cagtcatttggggaagttgttcgtggtg

SEQ ID NO: 5697 - DNA, 28 bp, Artificial Sequence
  Synthetic
cagtcatttgggagatcagaaggtgatt

SEQ ID NO: 5698 - DNA, 28 bp, Artificial Sequence
  Synthetic
cagtcatttgggattcctagaaattgtt

SEQ ID NO: 5699 - DNA, 28 bp, Artificial Sequence
  Synthetic
cagtcatttgggcgaatgttgctcggtg

SEQ ID NO: 5700 - DNA, 28 bp, Artificial Sequence
  Synthetic
cagtcatttgggaggttacccgagcaac

SEQ ID NO: 5701 - DNA, 28 bp, Artificial Sequence
  Synthetic
cagtcatttgggaatataacacagatgg

SEQ ID NO: 5702 - DNA, 28 bp, Artificial Sequence
  Synthetic
cagtcatttgggtagtagaccgtatagc

SEQ ID NO: 5703 - DNA, 28 bp, Artificial Sequence
  Synthetic
cagtcatttgggacttcacctggtccac

SEQ ID NO: 5704 - DNA, 28 bp, Artificial Sequence
  Synthetic
cagtcatttgggatcaacagacattaat

SEQ ID NO: 5705 - DNA, 28 bp, Artificial Sequence
  Synthetic
cagtcatttgggctggacttagggtcag

SEQ ID NO: 5706 - DNA, 28 bp, Artificial Sequence
  Synthetic
cagtcatttgggctggacttggagtcag

SEQ ID NO: 5707 - DNA, 28 bp, Artificial Sequence
  Synthetic
cagtcatttgggagctcggtctgaggcc

SEQ ID NO: 5708 - DNA, 28 bp, Artificial Sequence
  Synthetic
cagtcatttgggcagcagcaattcatgt

SEQ ID NO: 5709 - DNA, 28 bp, Artificial Sequence
  Synthetic
cagtcatttgggatcgggaatgtcgtgt

SEQ ID NO: 5710 - DNA, 28 bp, Artificial Sequence
  Synthetic
cagtcatttgggaatgacacgatcactc

SEQ ID NO: 5711 - DNA, 28 bp, Artificial Sequence
  Synthetic
cagtcatttgggtaatactgtctggtaa

SEQ ID NO: 5712 - DNA, 28 bp, Artificial Sequence
  Synthetic
cagtcatttgggtgtcttgcaggccgtc

SEQ ID NO: 5713 - DNA, 28 bp, Artificial Sequence
  Synthetic
cagtcatttgggtcttggagtaggtcat

SEQ ID NO: 5714 - DNA, 28 bp, Artificial Sequence
  Synthetic
cagtcatttgggctggatggctcctcca

SEQ ID NO: 5715 - DNA, 28 bp, Artificial Sequence
  Synthetic
cagtcatttgggatcatgatgggctcct

SEQ ID NO: 5716 - DNA, 28 bp, Artificial Sequence
  Synthetic
cagtcatttgggttgcatatgtaggatg

SEQ ID NO: 5717 - DNA, 28 bp, Artificial Sequence
  Synthetic
cagtcatttgggtggcagtgtattgtta

SEQ ID NO: 5718 - DNA, 28 bp, Artificial Sequence
  Synthetic
cagtcatttgggaggcagtgtattgtta

SEQ ID NO: 5719 - DNA, 28 bp, Artificial Sequence
  Synthetic
cagtcatttgggtttttgcgatgtgttc

SEQ ID NO: 5720 - DNA, 28 bp, Artificial Sequence
  Synthetic
cagtcatttgggaaaccgttaccattac

SEQ ID NO: 5721 - DNA, 28 bp, Artificial Sequence
  Synthetic
cagtcatttgggtgtttgcagaggaaac

SEQ ID NO: 5722 - DNA, 28 bp, Artificial Sequence
  Synthetic
cagtcatttgggtcagtctcatctgcaa

SEQ ID NO: 5723 - DNA, 28 bp, Artificial Sequence
  Synthetic
cagtcatttggggaggttgtccgtggtg

SEQ ID NO: 5724 - DNA, 28 bp, Artificial Sequence
  Synthetic
cagtcatttgggtagtgcaatattgctt

SEQ ID NO: 5725 - DNA, 28 bp, Artificial Sequence
  Synthetic
cagtcatttgggaccctatcaatattgt

SEQ ID NO: 5726 - DNA, 28 bp, Artificial Sequence
  Synthetic
cagtcatttgggtatgtgcctttggact

SEQ ID NO: 5727 - DNA, 28 bp, Artificial Sequence
  Synthetic
cagtcatttgggtcactcctctcctccc

SEQ ID NO: 5728 - DNA, 28 bp, Artificial Sequence
  Synthetic
cagtcatttgggtcaggctcagtcccct

SEQ ID NO: 5729 - DNA, 28 bp, Artificial Sequence
  Synthetic
cagtcatttggggtcatacacggctctc

SEQ ID NO: 5730 - DNA, 28 bp, Artificial Sequence
  Synthetic
cagtcatttgggagaggctggccgtgat

SEQ ID NO: 5731 - DNA, 28 bp, Artificial Sequence
  Synthetic
cagtcatttgggtcctgtactgagctgc

SEQ ID NO: 5732 - DNA, 28 bp, Artificial Sequence
  Synthetic
cagtcatttgggaatcatacagggacat

SEQ ID NO: 5733 - DNA, 28 bp, Artificial Sequence
  Synthetic
cagtcatttgggaatcgtacagggtcat

SEQ ID NO: 5734 - DNA, 28 bp, Artificial Sequence
  Synthetic
cagtcatttgggcccagataatggcact

SEQ ID NO: 5735 - DNA, 28 bp, Artificial Sequence
  Synthetic
cagtcatttgggagtgacatcacatata

SEQ ID NO: 5736 - DNA, 28 bp, Artificial Sequence
  Synthetic
cagtcatttgggcaacctggaggactcc

SEQ ID NO: 5737 - DNA, 28 bp, Artificial Sequence
  Synthetic
cagtcatttgggagtggggaacccttcc

SEQ ID NO: 5738 - DNA, 28 bp, Artificial Sequence
  Synthetic
cagtcatttgggaggacctgcgggacaa

SEQ ID NO: 5739 - DNA, 28 bp, Artificial Sequence
  Synthetic
cagtcatttgggtgaaggtctactgtgt

SEQ ID NO: 5740 - DNA, 28 bp, Artificial Sequence
  Synthetic
cagtcatttgggttgtacatggtaggct

SEQ ID NO: 5741 - DNA, 28 bp, Artificial Sequence
  Synthetic
cagtcatttgggtgaaacatacacggga

SEQ ID NO: 5742 - DNA, 28 bp, Artificial Sequence
  Synthetic
cagtcatttgggaaacaaacatggtgca

SEQ ID NO: 5743 - DNA, 28 bp, Artificial Sequence
  Synthetic
cagtcatttgggattacatggccaatct

SEQ ID NO: 5744 - DNA, 28 bp, Artificial Sequence
  Synthetic
cagtcatttgggcagcagcacactgtgg

SEQ ID NO: 5745 - DNA, 28 bp, Artificial Sequence
  Synthetic
cagtcatttgggtttcaagccagggggc

SEQ ID NO: 5746 - DNA, 28 bp, Artificial Sequence
  Synthetic
cagtcatttgggttaagacttgcagtga

SEQ ID NO: 5747 - DNA, 28 bp, Artificial Sequence
  Synthetic
cagtcatttgggatgcacctgggcaagg

SEQ ID NO: 5748 - DNA, 28 bp, Artificial Sequence
  Synthetic
cagtcatttgggaatcctttgtccctgg

SEQ ID NO: 5749 - DNA, 28 bp, Artificial Sequence
  Synthetic
cagtcatttgggatccttgctatctggg

SEQ ID NO: 5750 - DNA, 28 bp, Artificial Sequence
  Synthetic
cagtcatttgggtagcagcgggaacagt

SEQ ID NO: 5751 - DNA, 28 bp, Artificial Sequence
  Synthetic
cagtcatttgggagaccctggtctgcac

SEQ ID NO: 5752 - DNA, 28 bp, Artificial Sequence
  Synthetic
cagtcatttggggtcaacacttgctggt

SEQ ID NO: 5753 - DNA, 28 bp, Artificial Sequence
  Synthetic
cagtcatttgggtaaggcacccttctga

SEQ ID NO: 5754 - DNA, 28 bp, Artificial Sequence
  Synthetic
cagtcatttgggttttgcaccttttgga

SEQ ID NO: 5755 - DNA, 28 bp, Artificial Sequence
  Synthetic
cagtcatttgggtgattgtagccttttg

SEQ ID NO: 5756 - DNA, 28 bp, Artificial Sequence
  Synthetic
cagtcatttgggtgattggtacgtctgt

SEQ ID NO: 5757 - DNA, 28 bp, Artificial Sequence
  Synthetic
cagtcatttgggtactcaggagagtggc

SEQ ID NO: 5758 - DNA, 28 bp, Artificial Sequence
  Synthetic
cagtcatttggggtgtcttttgctctgc

SEQ ID NO: 5759 - DNA, 28 bp, Artificial Sequence
  Synthetic
cagtcatttgggaagtgctgtcatagct

SEQ ID NO: 5760 - DNA, 28 bp, Artificial Sequence
  Synthetic
cagtcatttgggcactcagccttgaggg

SEQ ID NO: 5761 - DNA, 28 bp, Artificial Sequence
  Synthetic
cagtcatttgggttcacagggaggtgtc

SEQ ID NO: 5762 - DNA, 28 bp, Artificial Sequence
  Synthetic
cagtcatttgggattgacacttctgtga

SEQ ID NO: 5763 - DNA, 28 bp, Artificial Sequence
  Synthetic
cagtcatttggggagtgccttcttttgg

SEQ ID NO: 5764 - DNA, 28 bp, Artificial Sequence
  Synthetic
cagtcatttgggttctccaaaagaaagc

SEQ ID NO: 5765 - DNA, 28 bp, Artificial Sequence
  Synthetic
cagtcatttgggtgcttcctttcagagg

SEQ ID NO: 5766 - DNA, 28 bp, Artificial Sequence
  Synthetic
cagtcatttgggcatctggaggtaagaa

SEQ ID NO: 5767 - DNA, 28 bp, Artificial Sequence
  Synthetic
cagtcatttgggcctctagatggaagca

SEQ ID NO: 5768 - DNA, 28 bp, Artificial Sequence
  Synthetic
cagtcatttgggatcgtgcatcccttta

SEQ ID NO: 5769 - DNA, 28 bp, Artificial Sequence
  Synthetic
cagtcatttgggtcgtgcatccctttag

SEQ ID NO: 5770 - DNA, 28 bp, Artificial Sequence
  Synthetic
cagtcatttgggatcgtgcatcctttta

SEQ ID NO: 5771 - DNA, 28 bp, Artificial Sequence
  Synthetic
cagtcatttgggaaagcgcttccctttg

SEQ ID NO: 5772 - DNA, 28 bp, Artificial Sequence
  Synthetic
cagtcatttgggcaaagcgctccccttt

SEQ ID NO: 5773 - DNA, 28 bp, Artificial Sequence
  Synthetic
cagtcatttgggcaaagcgcttctcttt

SEQ ID NO: 5774 - DNA, 28 bp, Artificial Sequence
  Synthetic
cagtcatttgggtctctggagggaagca

SEQ ID NO: 5775 - DNA, 28 bp, Artificial Sequence
  Synthetic
cagtcatttgggcaaagcgcttcccttt

SEQ ID NO: 5776 - DNA, 28 bp, Artificial Sequence
  Synthetic
cagtcatttgggaaagcgcttcccttca

SEQ ID NO: 5777 - DNA, 28 bp, Artificial Sequence
  Synthetic
cagtcatttgggaaagcgcttctcttta

SEQ ID NO: 5778 - DNA, 28 bp, Artificial Sequence
  Synthetic
cagtcatttgggctctagagggaagcac

SEQ ID NO: 5779 - DNA, 28 bp, Artificial Sequence
  Synthetic
cagtcatttgggaaagtgcatcctttta

SEQ ID NO: 5780 - DNA, 28 bp, Artificial Sequence
  Synthetic
cagtcatttgggaaagtgcatcctttta

SEQ ID NO: 5781 - DNA, 28 bp, Artificial Sequence
  Synthetic
cagtcatttgggaaagtgcatcttttta

SEQ ID NO: 5782 - DNA, 28 bp, Artificial Sequence
  Synthetic
cagtcatttgggcaaagtgcctcccttt

SEQ ID NO: 5783 - DNA, 28 bp, Artificial Sequence
  Synthetic
cagtcatttgggaaagtgcctcctttta

SEQ ID NO: 5784 - DNA, 28 bp, Artificial Sequence
  Synthetic
cagtcatttgggttctccaaaagggagc

SEQ ID NO: 5785 - DNA, 28 bp, Artificial Sequence
  Synthetic
cagtcatttgggaaagtgcttccctttg

SEQ ID NO: 5786 - DNA, 28 bp, Artificial Sequence
  Synthetic
cagtcatttgggctccagagggaagtac

SEQ ID NO: 5787 - DNA, 28 bp, Artificial Sequence
  Synthetic
cagtcatttgggaaagtgcttcctttta

SEQ ID NO: 5788 - DNA, 28 bp, Artificial Sequence
  Synthetic
cagtcatttgggaaagtgcttcctttta

SEQ ID NO: 5789 - DNA, 28 bp, Artificial Sequence
  Synthetic
cagtcatttgggaaagtgcttctctttg

SEQ ID NO: 5790 - DNA, 28 bp, Artificial Sequence
  Synthetic
cagtcatttgggtctacaaagggaagcc

SEQ ID NO: 5791 - DNA, 28 bp, Artificial Sequence
  Synthetic
cagtcatttgggaaagtgcttccttttt

SEQ ID NO: 5792 - DNA, 28 bp, Artificial Sequence
  Synthetic
cagtcatttgggaagtgcttccttttag

SEQ ID NO: 5793 - DNA, 28 bp, Artificial Sequence
  Synthetic
cagtcatttgggacaaagtgcttccctt

SEQ ID NO: 5794 - DNA, 28 bp, Artificial Sequence
  Synthetic
cagtcatttgggacaaagtgcttccctt

SEQ ID NO: 5795 - DNA, 28 bp, Artificial Sequence
  Synthetic
cagtcatttgggaacgcacttcccttta

SEQ ID NO: 5796 - DNA, 28 bp, Artificial Sequence
  Synthetic
cagtcatttgggaaaatggttcccttta

SEQ ID NO: 5797 - DNA, 28 bp, Artificial Sequence
  Synthetic
cagtcatttgggaacgcgcttccctata

SEQ ID NO: 5798 - DNA, 28 bp, Artificial Sequence
  Synthetic
cagtcatttggggaaggcgcttcccttt

SEQ ID NO: 5799 - DNA, 28 bp, Artificial Sequence
  Synthetic
cagtcatttgggctacaaagggaagcac

SEQ ID NO: 5800 - DNA, 28 bp, Artificial Sequence
  Synthetic
cagtcatttgggctccagagggatgcac

SEQ ID NO: 5801 - DNA, 28 bp, Artificial Sequence
  Synthetic
cagtcatttggggaaggcgcttcccttt

SEQ ID NO: 5802 - DNA, 28 bp, Artificial Sequence
  Synthetic
cagtcatttgggctctagagggaagcac

SEQ ID NO: 5803 - DNA, 28 bp, Artificial Sequence
  Synthetic
cagtcatttgggctcttgagggaagcac

SEQ ID NO: 5804 - DNA, 28 bp, Artificial Sequence
  Synthetic
cagtcatttgggaaagtgcttcctttta

SEQ ID NO: 5805 - DNA, 28 bp, Artificial Sequence
  Synthetic
cagtcatttgggctctagagggaagcgc

SEQ ID NO: 5806 - DNA, 28 bp, Artificial Sequence
  Synthetic
cagtcatttgggctgcaaagggaagccc

SEQ ID NO: 5807 - DNA, 28 bp, Artificial Sequence
  Synthetic
cagtcatttgggcatgccttgagtgtag

SEQ ID NO: 5808 - DNA, 28 bp, Artificial Sequence
  Synthetic
cagtcatttgggggagaaattatccttg

SEQ ID NO: 5809 - DNA, 28 bp, Artificial Sequence
  Synthetic
cagtcatttgggtgtgacagattgataa

SEQ ID NO: 5810 - DNA, 28 bp, Artificial Sequence
  Synthetic
cagtcatttgggtcggggatcatcatgt

SEQ ID NO: 5811 - DNA, 28 bp, Artificial Sequence
  Synthetic
cagtcatttgggattctgcatttttagc

SEQ ID NO: 5812 - DNA, 28 bp, Artificial Sequence
  Synthetic
cagtcatttgggatcagcaaacatttat

SEQ ID NO: 5813 - DNA, 28 bp, Artificial Sequence
  Synthetic
cagtcatttgggcaaaactggcaattac

SEQ ID NO: 5814 - DNA, 28 bp, Artificial Sequence
  Synthetic
cagtcatttgggcaagaacctcagttgc

SEQ ID NO: 5815 - DNA, 28 bp, Artificial Sequence
  Synthetic
cagtcatttgggcaaaaatctcaattac

SEQ ID NO: 5816 - DNA, 28 bp, Artificial Sequence
  Synthetic
cagtcatttgggcaaaaaccacagtttc

SEQ ID NO: 5817 - DNA, 28 bp, Artificial Sequence
  Synthetic
cagtcatttgggtgacaactatggatga

SEQ ID NO: 5818 - DNA, 28 bp, Artificial Sequence
  Synthetic
cagtcatttgggtgtcttactccctcag

SEQ ID NO: 5819 - DNA, 28 bp, Artificial Sequence
  Synthetic
cagtcatttggggcgacccactcttggt

SEQ ID NO: 5820 - DNA, 28 bp, Artificial Sequence
  Synthetic
cagtcatttggggcgacccatacttggt

SEQ ID NO: 5821 - DNA, 28 bp, Artificial Sequence
  Synthetic
cagtcatttgggaacaggtgactggtta

SEQ ID NO: 5822 - DNA, 28 bp, Artificial Sequence
  Synthetic
cagtcatttgggaaaacggtgagatttt

SEQ ID NO: 5823 - DNA, 28 bp, Artificial Sequence
  Synthetic
cagtcatttggggctagtcctgactcag

SEQ ID NO: 5824 - DNA, 28 bp, Artificial Sequence
  Synthetic
cagtcatttgggagggtaagctgaacct

SEQ ID NO: 5825 - DNA, 28 bp, Artificial Sequence
  Synthetic
cagtcatttggggatgagctcattgtaa

SEQ ID NO: 5826 - DNA, 28 bp, Artificial Sequence
  Synthetic
cagtcatttggggtttgcacgggtgggc

SEQ ID NO: 5827 - DNA, 28 bp, Artificial Sequence
  Synthetic
cagtcatttgggtgagctgctgtaccaa

SEQ ID NO: 5828 - DNA, 28 bp, Artificial Sequence
  Synthetic
cagtcatttgggtaaagtaaatatgcac

SEQ ID NO: 5829 - DNA, 28 bp, Artificial Sequence
  Synthetic
cagtcatttggggcgtgcgccggccggc

SEQ ID NO: 5830 - DNA, 28 bp, Artificial Sequence
  Synthetic
cagtcatttgggcaaagtttaagatcct

SEQ ID NO: 5831 - DNA, 28 bp, Artificial Sequence
  Synthetic
cagtcatttgggaaagtagctgtaccat

SEQ ID NO: 5832 - DNA, 28 bp, Artificial Sequence
  Synthetic
cagtcatttgggaggttgacatacgttt

SEQ ID NO: 5833 - DNA, 28 bp, Artificial Sequence
  Synthetic
cagtcatttgggaggcacggtgtcagca

SEQ ID NO: 5834 - DNA, 28 bp, Artificial Sequence
  Synthetic
cagtcatttgggggctggctcgcgatgt

SEQ ID NO: 5835 - DNA, 28 bp, Artificial Sequence
  Synthetic
cagtcatttggggggcgcctgtgatccc

SEQ ID NO: 5836 - DNA, 28 bp, Artificial Sequence
  Synthetic
cagtcatttgggagtatgttcttccagg

SEQ ID NO: 5837 - DNA, 28 bp, Artificial Sequence
  Synthetic
cagtcatttgggatgtataaatgtatac

SEQ ID NO: 5838 - DNA, 28 bp, Artificial Sequence
  Synthetic
cagtcatttgggagttaatgaatcctgg

SEQ ID NO: 5839 - DNA, 28 bp, Artificial Sequence
  Synthetic
cagtcatttggggaaaacagcaattacc

SEQ ID NO: 5840 - DNA, 28 bp, Artificial Sequence
  Synthetic
cagtcatttgggtgagttggccatctga

SEQ ID NO: 5841 - DNA, 28 bp, Artificial Sequence
  Synthetic
cagtcatttggggtccgctcggcggtgg

SEQ ID NO: 5842 - DNA, 28 bp, Artificial Sequence
  Synthetic
cagtcatttgggctgaagtgatgtgtaa

SEQ ID NO: 5843 - DNA, 28 bp, Artificial Sequence
  Synthetic
cagtcatttgggcacgctcatgcacaca

SEQ ID NO: 5844 - DNA, 28 bp, Artificial Sequence
  Synthetic
cagtcatttggggagccagttggacagg

SEQ ID NO: 5845 - DNA, 28 bp, Artificial Sequence
  Synthetic
cagtcatttgggattctaatttctccac

SEQ ID NO: 5846 - DNA, 28 bp, Artificial Sequence
  Synthetic
cagtcatttgggtagataaaatattggt

SEQ ID NO: 5847 - DNA, 28 bp, Artificial Sequence
  Synthetic
cagtcatttgggcttcttgtgctctagg

SEQ ID NO: 5848 - DNA, 28 bp, Artificial Sequence
  Synthetic
cagtcatttgggattcatttggtataaa

SEQ ID NO: 5849 - DNA, 28 bp, Artificial Sequence
  Synthetic
cagtcatttgggttgagaatgatgaatc

SEQ ID NO: 5850 - DNA, 28 bp, Artificial Sequence
  Synthetic
cagtcatttgggtcttgtgttctctaga

SEQ ID NO: 5851 - DNA, 28 bp, Artificial Sequence
  Synthetic
cagtcatttgggttacagttgttcaacc

SEQ ID NO: 5852 - DNA, 28 bp, Artificial Sequence
  Synthetic
cagtcatttgggcaaagaggaaggtccc

SEQ ID NO: 5853 - DNA, 28 bp, Artificial Sequence
  Synthetic
cagtcatttgggttatggtttgcctggg

SEQ ID NO: 5854 - DNA, 28 bp, Artificial Sequence
  Synthetic
cagtcatttgggtgggcgtatctgtatg

SEQ ID NO: 5855 - DNA, 28 bp, Artificial Sequence
  Synthetic
cagtcatttgggtatgcattgtattttt

SEQ ID NO: 5856 - DNA, 28 bp, Artificial Sequence
  Synthetic
cagtcatttgggtttccataggtgatga

SEQ ID NO: 5857 - DNA, 28 bp, Artificial Sequence
  Synthetic
cagtcatttgggttggccacaatgggtt

SEQ ID NO: 5858 - DNA, 28 bp, Artificial Sequence
  Synthetic
cagtcatttgggtcagaacaaatgccgg

SEQ ID NO: 5859 - DNA, 28 bp, Artificial Sequence
  Synthetic
cagtcatttggggagcttattcataaaa

SEQ ID NO: 5860 - DNA, 28 bp, Artificial Sequence
  Synthetic
cagtcatttgggagaccatgggttctca

SEQ ID NO: 5861 - DNA, 28 bp, Artificial Sequence
  Synthetic
cagtcatttgggttgtgtcaatatgcga

SEQ ID NO: 5862 - DNA, 28 bp, Artificial Sequence
  Synthetic
cagtcatttgggaggcaccagccaggca

SEQ ID NO: 5863 - DNA, 28 bp, Artificial Sequence
  Synthetic
cagtcatttgggcccatctggggtggcc

SEQ ID NO: 5864 - DNA, 28 bp, Artificial Sequence
  Synthetic
cagtcatttggggaagtgtgccgtggtg

SEQ ID NO: 5865 - DNA, 28 bp, Artificial Sequence
  Synthetic
cagtcatttgggaagcctgcccggctcc

SEQ ID NO: 5866 - DNA, 28 bp, Artificial Sequence
  Synthetic
cagtcatttgggtgtgtcactcgatgac

SEQ ID NO: 5867 - DNA, 28 bp, Artificial Sequence
  Synthetic
cagtcatttgggtacgtcatcgttgtca

SEQ ID NO: 5868 - DNA, 28 bp, Artificial Sequence
  Synthetic
cagtcatttggggttgtgtcagtttatc

SEQ ID NO: 5869 - DNA, 28 bp, Artificial Sequence
  Synthetic
cagtcatttgggacttacagacaagagc

SEQ ID NO: 5870 - DNA, 28 bp, Artificial Sequence
  Synthetic
cagtcatttgggtggtctaggattgttg

SEQ ID NO: 5871 - DNA, 28 bp, Artificial Sequence
  Synthetic
cagtcatttggggacacgggcgacagct

SEQ ID NO: 5872 - DNA, 28 bp, Artificial Sequence
  Synthetic
cagtcatttgggcacacactgcaattac

SEQ ID NO: 5873 - DNA, 28 bp, Artificial Sequence
  Synthetic
cagtcatttgggaggctgcggaattcag

SEQ ID NO: 5874 - DNA, 28 bp, Artificial Sequence
  Synthetic
cagtcatttgggtaaatcccatggtgcc

SEQ ID NO: 5875 - DNA, 28 bp, Artificial Sequence
  Synthetic
cagtcatttgggaaactactgaaaatca

SEQ ID NO: 5876 - DNA, 28 bp, Artificial Sequence
  Synthetic
cagtcatttggggttcaaatccagatct

SEQ ID NO: 5877 - DNA, 28 bp, Artificial Sequence
  Synthetic
cagtcatttgggaggggtggtgttggga

SEQ ID NO: 5878 - DNA, 28 bp, Artificial Sequence
  Synthetic
cagtcatttgggagggtgtttctctcat

SEQ ID NO: 5879 - DNA, 28 bp, Artificial Sequence
  Synthetic
cagtcatttgggtgagctaaatgtgtgc

SEQ ID NO: 5880 - DNA, 28 bp, Artificial Sequence
  Synthetic
cagtcatttggggcgaggacccctcggg

SEQ ID NO: 5881 - DNA, 28 bp, Artificial Sequence
  Synthetic
cagtcatttggggctgggcagggcttct

SEQ ID NO: 5882 - DNA, 28 bp, Artificial Sequence
  Synthetic
cagtcatttgggaggaatgttccttctt

SEQ ID NO: 5883 - DNA, 28 bp, Artificial Sequence
  Synthetic
cagtcatttggggaacgcctgttcttgc

SEQ ID NO: 5884 - DNA, 28 bp, Artificial Sequence
  Synthetic
cagtcatttgggtccgagcctgggtctc

SEQ ID NO: 5885 - DNA, 28 bp, Artificial Sequence
  Synthetic
cagtcatttgggactcaaaacccttcag

SEQ ID NO: 5886 - DNA, 28 bp, Artificial Sequence
  Synthetic
cagtcatttgggagacttcccatttgaa

SEQ ID NO: 5887 - DNA, 28 bp, Artificial Sequence
  Synthetic
cagtcatttgggaaactctacttgtcct

SEQ ID NO: 5888 - DNA, 28 bp, Artificial Sequence
  Synthetic
cagtcatttggggacctggacatgtttg

SEQ ID NO: 5889 - DNA, 28 bp, Artificial Sequence
  Synthetic
cagtcatttgggatggagatagatatag

SEQ ID NO: 5890 - DNA, 28 bp, Artificial Sequence
  Synthetic
cagtcatttgggggctagcaacagcgct

SEQ ID NO: 5891 - DNA, 28 bp, Artificial Sequence
  Synthetic
cagtcatttgggacagtctgctgaggtt

SEQ ID NO: 5892 - DNA, 28 bp, Artificial Sequence
  Synthetic
cagtcatttgggatcccttgcaggggct

SEQ ID NO: 5893 - DNA, 28 bp, Artificial Sequence
  Synthetic
cagtcatttgggtagtaccagtaccttg

SEQ ID NO: 5894 - DNA, 28 bp, Artificial Sequence
  Synthetic
cagtcatttgggagggggaaagttctat

SEQ ID NO: 5895 - DNA, 28 bp, Artificial Sequence
  Synthetic
cagtcatttgggagctgtctgaaaatgt

SEQ ID NO: 5896 - DNA, 28 bp, Artificial Sequence
  Synthetic
cagtcatttggggtgagtctctaagaaa

SEQ ID NO: 5897 - DNA, 28 bp, Artificial Sequence
  Synthetic
cagtcatttgggtctagtaagagtggca

SEQ ID NO: 5898 - DNA, 28 bp, Artificial Sequence
  Synthetic
cagtcatttggggttctcccaacgtaag

SEQ ID NO: 5899 - DNA, 28 bp, Artificial Sequence
  Synthetic
cagtcatttgggagtattctgtaccagg

SEQ ID NO: 5900 - DNA, 28 bp, Artificial Sequence
  Synthetic
cagtcatttgggagacctggcccagacc

SEQ ID NO: 5901 - DNA, 28 bp, Artificial Sequence
  Synthetic
cagtcatttggggtgtctgcttcctgtg

SEQ ID NO: 5902 - DNA, 28 bp, Artificial Sequence
  Synthetic
cagtcatttgggctaatagtatctacca

SEQ ID NO: 5903 - DNA, 28 bp, Artificial Sequence
  Synthetic
cagtcatttgggaaccagcaccccaact

SEQ ID NO: 5904 - DNA, 28 bp, Artificial Sequence
  Synthetic
cagtcatttgggacttgggcactgaaac

SEQ ID NO: 5905 - DNA, 28 bp, Artificial Sequence
  Synthetic
cagtcatttgggtgtgcttgctcgtccc

SEQ ID NO: 5906 - DNA, 28 bp, Artificial Sequence
  Synthetic
cagtcatttgggactgggggctttcggg

SEQ ID NO: 5907 - DNA, 28 bp, Artificial Sequence
  Synthetic
cagtcatttgggagggatcgcgggcggg

SEQ ID NO: 5908 - DNA, 28 bp, Artificial Sequence
  Synthetic
cagtcatttgggatcgctgcggttgcga

SEQ ID NO: 5909 - DNA, 28 bp, Artificial Sequence
  Synthetic
cagtcatttgggatgatccaggaacctg

SEQ ID NO: 5910 - DNA, 28 bp, Artificial Sequence
  Synthetic
cagtcatttgggaaagacataggataga

SEQ ID NO: 5911 - DNA, 28 bp, Artificial Sequence
  Synthetic
cagtcatttggggtccctctccaaatgt

SEQ ID NO: 5912 - DNA, 28 bp, Artificial Sequence
  Synthetic
cagtcatttgggacttgtatgctagctc

SEQ ID NO: 5913 - DNA, 28 bp, Artificial Sequence
  Synthetic
cagtcatttgggagtgtggctttcttag

SEQ ID NO: 5914 - DNA, 28 bp, Artificial Sequence
  Synthetic
cagtcatttgggtctaggctggtactgc

SEQ ID NO: 5915 - DNA, 28 bp, Artificial Sequence
  Synthetic
cagtcatttgggaagcagctgcctctga

SEQ ID NO: 5916 - DNA, 28 bp, Artificial Sequence
  Synthetic
cagtcatttggggtggctgcactcactt

SEQ ID NO: 5917 - DNA, 28 bp, Artificial Sequence
  Synthetic
cagtcatttgggaagtgtgcagggcact

SEQ ID NO: 5918 - DNA, 28 bp, Artificial Sequence
  Synthetic
cagtcatttgggaaacctgtgttgttca

SEQ ID NO: 5919 - DNA, 28 bp, Artificial Sequence
  Synthetic
cagtcatttgggaggaggcagcgctctc

SEQ ID NO: 5920 - DNA, 28 bp, Artificial Sequence
  Synthetic
cagtcatttgggtttaggataagcttga

SEQ ID NO: 5921 - DNA, 28 bp, Artificial Sequence
  Synthetic
cagtcatttgggaatggcgccactaggg

SEQ ID NO: 5922 - DNA, 28 bp, Artificial Sequence
  Synthetic
cagtcatttgggttgaaacaatctctac

SEQ ID NO: 5923 - DNA, 28 bp, Artificial Sequence
  Synthetic
cagtcatttgggtggtgggccgcagaac

SEQ ID NO: 5924 - DNA, 28 bp, Artificial Sequence
  Synthetic
cagtcatttgggataatacatggttaac

SEQ ID NO: 5925 - DNA, 28 bp, Artificial Sequence
  Synthetic
cagtcatttgggaatattatacagtcaa

SEQ ID NO: 5926 - DNA, 28 bp, Artificial Sequence
  Synthetic
cagtcatttgggggcaggttctcaccct

SEQ ID NO: 5927 - DNA, 28 bp, Artificial Sequence
  Synthetic
cagtcatttgggggcggagggaagtagg

SEQ ID NO: 5928 - DNA, 28 bp, Artificial Sequence
  Synthetic
cagtcatttgggcttggttcagggaggg

SEQ ID NO: 5929 - DNA, 28 bp, Artificial Sequence
  Synthetic
cagtcatttgggtacccattgcatatcg

SEQ ID NO: 5930 - DNA, 28 bp, Artificial Sequence
  Synthetic
cagtcatttgggtgcctgggtctctggc

SEQ ID NO: 5931 - DNA, 28 bp, Artificial Sequence
  Synthetic
cagtcatttgggtcccacgttgtggccc

SEQ ID NO: 5932 - DNA, 28 bp, Artificial Sequence
  Synthetic
cagtcatttgggaggcggggcgccgcgg

SEQ ID NO: 5933 - DNA, 28 bp, Artificial Sequence
  Synthetic
cagtcatttgggtgtcactcggctcggc

SEQ ID NO: 5934 - DNA, 28 bp, Artificial Sequence
  Synthetic
cagtcatttgggaggaagccctggaggg

SEQ ID NO: 5935 - DNA, 28 bp, Artificial Sequence
  Synthetic
cagtcatttgggtggaagactagtgatt

SEQ ID NO: 5936 - DNA, 28 bp, Artificial Sequence
  Synthetic
cagtcatttgggtttgtgacctggtcca

SEQ ID NO: 5937 - DNA, 28 bp, Artificial Sequence
  Synthetic
cagtcatttgggtggaggagaaggaagg

SEQ ID NO: 5938 - DNA, 28 bp, Artificial Sequence
  Synthetic
cagtcatttgggactccagccccacagc

SEQ ID NO: 5939 - DNA, 28 bp, Artificial Sequence
  Synthetic
cagtcatttgggtctgctcataccccat

SEQ ID NO: 5940 - DNA, 28 bp, Artificial Sequence
  Synthetic
cagtcatttgggtgcaccatggttgtct

SEQ ID NO: 5941 - DNA, 28 bp, Artificial Sequence
  Synthetic
cagtcatttgggtcacaatgctgacact

SEQ ID NO: 5942 - DNA, 28 bp, Artificial Sequence
  Synthetic
cagtcatttggggttggaggatgaaagt

SEQ ID NO: 5943 - DNA, 28 bp, Artificial Sequence
  Synthetic
cagtcatttgggctgggatctccggggt

SEQ ID NO: 5944 - DNA, 28 bp, Artificial Sequence
  Synthetic
cagtcatttgggtgagacctctgggttc

SEQ ID NO: 5945 - DNA, 28 bp, Artificial Sequence
  Synthetic
cagtcatttgggtccagtaccacgtgtc

SEQ ID NO: 5946 - DNA, 28 bp, Artificial Sequence
  Synthetic
cagtcatttggggattgctctgcgtgcg

SEQ ID NO: 5947 - DNA, 28 bp, Artificial Sequence
  Synthetic
cagtcatttgggcagtaacaaagattca

SEQ ID NO: 5948 - DNA, 28 bp, Artificial Sequence
  Synthetic
cagtcatttgggtctttggttatctagc

SEQ ID NO: 5949 - DNA, 28 bp, Artificial Sequence
  Synthetic
cagtcatttgggtaaagctagataaccg

SEQ ID NO: 5950 - DNA, 28 bp, Artificial Sequence
  Synthetic
cagtcatttgggtattgcacttgtcccg

SEQ ID NO: 5951 - DNA, 28 bp, Artificial Sequence
  Synthetic
cagtcatttgggtattgcactcgtcccg

SEQ ID NO: 5952 - DNA, 28 bp, Artificial Sequence
  Synthetic
cagtcatttgggaaagtgctgttcgtgc

SEQ ID NO: 5953 - DNA, 28 bp, Artificial Sequence
  Synthetic
cagtcatttgggttcaacgggtatttat

SEQ ID NO: 5954 - DNA, 28 bp, Artificial Sequence
  Synthetic
cagtcatttgggtttggcactagcacat

SEQ ID NO: 5955 - DNA, 28 bp, Artificial Sequence
  Synthetic
cagtcatttgggtgaggtagtaagttgt

SEQ ID NO: 5956 - DNA, 28 bp, Artificial Sequence
  Synthetic
cagtcatttgggaacccgtagatccgat

SEQ ID NO: 5957 - DNA, 28 bp, Artificial Sequence
  Synthetic
cagtcatttgggcacccgtagaaccgac

SEQ ID NO: 5958 - DNA, 28 bp, Artificial Sequence
  Synthetic
cagtcatttgggtggaaggacgggaagt

SEQ ID NO: 5959 - DNA, 28 bp, Artificial Sequence
  Synthetic
cagtcatttgggattacaggaaactggg

SEQ ID NO: 5960 - DNA, 28 bp, Artificial Sequence
  Synthetic
cagtcatttgggtagtgttgtccccccg

SEQ ID NO: 5961 - DNA, 28 bp, Artificial Sequence
  Synthetic
cagtcatttgggtggtgttgtccccccg

SEQ ID NO: 5962 - DNA, 28 bp, Artificial Sequence
  Synthetic
cagtcatttgggttaatgcttagcctgt

SEQ ID NO: 5963 - DNA, 28 bp, Artificial Sequence
  Synthetic
cagtcatttgggaccaggccaccattcc

SEQ ID NO: 5964 - DNA, 28 bp, Artificial Sequence
  Synthetic
cagtcatttgggaactgtagtccgggtc

SEQ ID NO: 5965 - DNA, 28 bp, Artificial Sequence
  Synthetic
cagtcatttgggtcacattctgaggacg

SEQ ID NO: 5966 - DNA, 28 bp, Artificial Sequence
  Synthetic
cagtcatttgggtcgcggtcacagaatg

SEQ ID NO: 5967 - DNA, 28 bp, Artificial Sequence
  Synthetic
cagtcatttgggtagaatactgaggcct

SEQ ID NO: 5968 - DNA, 28 bp, Artificial Sequence
  Synthetic
cagtcatttgggagctaaaccgcagtac

SEQ ID NO: 5969 - DNA, 28 bp, Artificial Sequence
  Synthetic
cagtcatttgggtaggatgcctggaact

SEQ ID NO: 5970 - DNA, 28 bp, Artificial Sequence
  Synthetic
cagtcatttgggtgatggttttcgggct

SEQ ID NO: 5971 - DNA, 28 bp, Artificial Sequence
  Synthetic
cagtcatttgggccagcagcacctaatc

SEQ ID NO: 5972 - DNA, 28 bp, Artificial Sequence
  Synthetic
cagtcatttgggtgatcccatgttgctg

SEQ ID NO: 5973 - DNA, 28 bp, Artificial Sequence
  Synthetic
cagtcatttgggtaggcgcgactgagag

SEQ ID NO: 5974 - DNA, 28 bp, Artificial Sequence
  Synthetic
cagtcatttgggctgggtatacgcagct

SEQ ID NO: 5975 - DNA, 28 bp, Artificial Sequence
  Synthetic
cagtcatttgggacccagctgcgtaaac

SEQ ID NO: 5976 - DNA, 28 bp, Artificial Sequence
  Synthetic
cagtcatttgggtccctgagaccctaac

SEQ ID NO: 5977 - DNA, 28 bp, Artificial Sequence
  Synthetic
cagtcatttgggtagcagcacataatgg

SEQ ID NO: 5978 - DNA, 28 bp, Artificial Sequence
  Synthetic
cagtcatttgggtagcagcacgtaaata

SEQ ID NO: 5979 - DNA, 28 bp, Artificial Sequence
  Synthetic
cagtcatttgggactgcagtgaaggcac

SEQ ID NO: 5980 - DNA, 28 bp, Artificial Sequence
  Synthetic
cagtcatttgggcaaagtgcttacagtg

SEQ ID NO: 5981 - DNA, 28 bp, Artificial Sequence
  Synthetic
cagtcatttgggtaaggtgcatctagtg

SEQ ID NO: 5982 - DNA, 28 bp, Artificial Sequence
  Synthetic
cagtcatttgggtgtgcaaatctatgca

SEQ ID NO: 5983 - DNA, 28 bp, Artificial Sequence
  Synthetic
cagtcatttgggtgtgcaaatccatgca

SEQ ID NO: 5984 - DNA, 28 bp, Artificial Sequence
  Synthetic
cagtcatttgggtaaagtgcttatagtg

SEQ ID NO: 5985 - DNA, 28 bp, Artificial Sequence
  Synthetic
cagtcatttgggtaatctcagctggcaa

SEQ ID NO: 5986 - DNA, 28 bp, Artificial Sequence
  Synthetic
cagtcatttgggttgtgcttgatctaac

SEQ ID NO: 5987 - DNA, 28 bp, Artificial Sequence
  Synthetic
cagtcatttgggaagctgccagttgaag

SEQ ID NO: 5988 - DNA, 28 bp, Artificial Sequence
  Synthetic
cagtcatttgggatcacattgccaggga

SEQ ID NO: 5989 - DNA, 28 bp, Artificial Sequence
  Synthetic
cagtcatttgggttcacagtggctaagt

SEQ ID NO: 5990 - DNA, 28 bp, Artificial Sequence
  Synthetic
cagtcatttgggtattgcacttgtcccg

SEQ ID NO: 5991 - DNA, 28 bp, Artificial Sequence
  Synthetic
cagtcatttgggaacccgtagatccgaa

SEQ ID NO: 5992 - DNA, 28 bp, Artificial Sequence
  Synthetic
cagtcatttgggtacagtactgtgataa

SEQ ID NO: 5993 - DNA, 28 bp, Artificial Sequence
  Synthetic
cagtcatttgggagcagcattgtacagg

SEQ ID NO: 5994 - DNA, 28 bp, Artificial Sequence
  Synthetic
cagtcatttgggtcaaatgctcagactc

SEQ ID NO: 5995 - DNA, 28 bp, Artificial Sequence
  Synthetic
cagtcatttgggtaaagtgctgacagtg

SEQ ID NO: 5996 - DNA, 28 bp, Artificial Sequence
  Synthetic
cagtcatttgggagcagcattgtacagg

SEQ ID NO: 5997 - DNA, 28 bp, Artificial Sequence
  Synthetic
cagtcatttgggttaaggcacgcggtga

SEQ ID NO: 5998 - DNA, 28 bp, Artificial Sequence
  Synthetic
cagtcatttgggtccctgagaccctaac

SEQ ID NO: 5999 - DNA, 28 bp, Artificial Sequence
  Synthetic
cagtcatttgggtcggatccgtctgagc

SEQ ID NO: 6000 - DNA, 28 bp, Artificial Sequence
  Synthetic
cagtcatttgggttggtccccttcaacc

SEQ ID NO: 6001 - DNA, 28 bp, Artificial Sequence
  Synthetic
cagtcatttgggtatggctttttattcc

SEQ ID NO: 6002 - DNA, 28 bp, Artificial Sequence
  Synthetic
cagtcatttgggtctacagtgcacgtgt

SEQ ID NO: 6003 - DNA, 28 bp, Artificial Sequence
  Synthetic
cagtcatttgggtgagatgaagcactgt

SEQ ID NO: 6004 - DNA, 28 bp, Artificial Sequence
  Synthetic
cagtcatttgggtagcagcacataatgg

SEQ ID NO: 6005 - DNA, 28 bp, Artificial Sequence
  Synthetic
cagtcatttgggtagcagcacatcatgg

SEQ ID NO: 6006 - DNA, 28 bp, Artificial Sequence
  Synthetic
cagtcatttgggtagcagcacgtaaata

SEQ ID NO: 6007 - DNA, 28 bp, Artificial Sequence
  Synthetic
cagtcatttgggactgcagtgaaggcac

SEQ ID NO: 6008 - DNA, 28 bp, Artificial Sequence
  Synthetic
cagtcatttgggcaaagtgcttacagtg

SEQ ID NO: 6009 - DNA, 28 bp, Artificial Sequence
  Synthetic
cagtcatttgggtaaggtgcatctagtg

SEQ ID NO: 6010 - DNA, 28 bp, Artificial Sequence
  Synthetic
cagtcatttgggaacattcaacgctgtc

SEQ ID NO: 6011 - DNA, 28 bp, Artificial Sequence
  Synthetic
cagtcatttgggaccatcgaccgttgat

SEQ ID NO: 6012 - DNA, 28 bp, Artificial Sequence
  Synthetic
cagtcatttgggaacattcattgctgtc

SEQ ID NO: 6013 - DNA, 28 bp, Artificial Sequence
  Synthetic
cagtcatttgggtaggtagtttcatgtt

SEQ ID NO: 6014 - DNA, 28 bp, Artificial Sequence
  Synthetic
cagtcatttgggggtccagaagggagct

SEQ ID NO: 6015 - DNA, 28 bp, Artificial Sequence
  Synthetic
cagtcatttgggcccagtgttcagacta

SEQ ID NO: 6016 - DNA, 28 bp, Artificial Sequence
  Synthetic
cagtcatttgggtgtgcaaatctatgca

SEQ ID NO: 6017 - DNA, 28 bp, Artificial Sequence
  Synthetic
cagtcatttgggtgtgcaaatccatgca

SEQ ID NO: 6018 - DNA, 28 bp, Artificial Sequence
  Synthetic
cagtcatttgggtaaagtgcttatagtg

SEQ ID NO: 6019 - DNA, 28 bp, Artificial Sequence
  Synthetic
cagtcatttgggtccttcattccaccgg

SEQ ID NO: 6020 - DNA, 28 bp, Artificial Sequence
  Synthetic
cagtcatttgggttgtgcttgatctaac

SEQ ID NO: 6021 - DNA, 28 bp, Artificial Sequence
  Synthetic
cagtcatttgggaagctgccagttgaag

SEQ ID NO: 6022 - DNA, 28 bp, Artificial Sequence
  Synthetic
cagtcatttgggcattgcacttgtctcg

SEQ ID NO: 6023 - DNA, 28 bp, Artificial Sequence
  Synthetic
cagtcatttgggttcaagtaatccagga

SEQ ID NO: 6024 - DNA, 28 bp, Artificial Sequence
  Synthetic
cagtcatttgggaaggagctcacagtct

SEQ ID NO: 6025 - DNA, 28 bp, Artificial Sequence
  Synthetic
cagtcatttgggctagcaccatctgaaa

SEQ ID NO: 6026 - DNA, 28 bp, Artificial Sequence
  Synthetic
cagtcatttgggtagcaccatttgaaat

SEQ ID NO: 6027 - DNA, 28 bp, Artificial Sequence
  Synthetic
cagtcatttgggtgtaaacatcctacac

SEQ ID NO: 6028 - DNA, 28 bp, Artificial Sequence
  Synthetic
cagtcatttgggtgtaaacatcctacac

SEQ ID NO: 6029 - DNA, 28 bp, Artificial Sequence
  Synthetic
cagtcatttgggtggcagtgtcttagct

SEQ ID NO: 6030 - DNA, 28 bp, Artificial Sequence
  Synthetic
cagtcatttgggtggaagactagtgatt

SEQ ID NO: 6031 - DNA, 28 bp, Artificial Sequence
  Synthetic
cagtcatttgggtctttggttatctagc

SEQ ID NO: 6032 - DNA, 28 bp, Artificial Sequence
  Synthetic
cagtcatttgggtattgcacttgtcccg

SEQ ID NO: 6033 - DNA, 28 bp, Artificial Sequence
  Synthetic
cagtcatttgggaaagtgctgttcgtgc

SEQ ID NO: 6034 - DNA, 28 bp, Artificial Sequence
  Synthetic
cagtcatttgggttcaacgggtatttat

SEQ ID NO: 6035 - DNA, 28 bp, Artificial Sequence
  Synthetic
cagtcatttgggaacccgtagatccgat

SEQ ID NO: 6036 - DNA, 28 bp, Artificial Sequence
  Synthetic
cagtcatttgggtgaggtagtaggttgt

SEQ ID NO: 6037 - DNA, 28 bp, Artificial Sequence
  Synthetic
cagtcatttgggtgaggtagtaggttgt

SEQ ID NO: 6038 - DNA, 28 bp, Artificial Sequence
  Synthetic
cagtcatttgggagaggtagtaggttgc

SEQ ID NO: 6039 - DNA, 28 bp, Artificial Sequence
  Synthetic
cagtcatttgggtgaggtagtagattgt

SEQ ID NO: 6040 - DNA, 28 bp, Artificial Sequence
  Synthetic
cagtcatttgggtgaggtagtagtttgt

SEQ ID NO: 6041 - DNA, 28 bp, Artificial Sequence
  Synthetic
cagtcatttgggtgaggtagtagtttgt

SEQ ID NO: 6042 - DNA, 28 bp, Artificial Sequence
  Synthetic
cagtcatttgggtggaatgtaaagaagt

SEQ ID NO: 6043 - DNA, 28 bp, Artificial Sequence
  Synthetic
cagtcatttgggaacccgtagatccgaa

SEQ ID NO: 6044 - DNA, 28 bp, Artificial Sequence
  Synthetic
cagtcatttgggtacagtactgtgataa

SEQ ID NO: 6045 - DNA, 28 bp, Artificial Sequence
  Synthetic
cagtcatttgggagcagcattgtacagg

SEQ ID NO: 6046 - DNA, 28 bp, Artificial Sequence
  Synthetic
cagtcatttgggagcagcattgtacagg

SEQ ID NO: 6047 - DNA, 28 bp, Artificial Sequence
  Synthetic
cagtcatttgggtaccctgtagatccga

SEQ ID NO: 6048 - DNA, 28 bp, Artificial Sequence
  Synthetic
cagtcatttgggataccctgtagaaccg

SEQ ID NO: 6049 - DNA, 28 bp, Artificial Sequence
  Synthetic
cagtcatttgggtggagtgtgacaatgg

SEQ ID NO: 6050 - DNA, 28 bp, Artificial Sequence
  Synthetic
cagtcatttgggttaaggcacgcggtga

SEQ ID NO: 6051 - DNA, 28 bp, Artificial Sequence
  Synthetic
cagtcatttgggtccctgagaccctaac

SEQ ID NO: 6052 - DNA, 28 bp, Artificial Sequence
  Synthetic
cagtcatttgggtcacagtgaaccggtc

SEQ ID NO: 6053 - DNA, 28 bp, Artificial Sequence
  Synthetic
cagtcatttgggctttttgcggtctggg

SEQ ID NO: 6054 - DNA, 28 bp, Artificial Sequence
  Synthetic
cagtcatttgggcagtgcaatgtaaaaa

SEQ ID NO: 6055 - DNA, 28 bp, Artificial Sequence
  Synthetic
cagtcatttgggtaacagtctacagcca

SEQ ID NO: 6056 - DNA, 28 bp, Artificial Sequence
  Synthetic
cagtcatttgggttggtccccttcaacc

SEQ ID NO: 6057 - DNA, 28 bp, Artificial Sequence
  Synthetic
cagtcatttgggtatggctttttattcc

SEQ ID NO: 6058 - DNA, 28 bp, Artificial Sequence
  Synthetic
cagtcatttgggtatggcttttcattcc

SEQ ID NO: 6059 - DNA, 28 bp, Artificial Sequence
  Synthetic
cagtcatttgggtattgcttaagaatac

SEQ ID NO: 6060 - DNA, 28 bp, Artificial Sequence
  Synthetic
cagtcatttgggagctggtgttgtgaat

SEQ ID NO: 6061 - DNA, 28 bp, Artificial Sequence
  Synthetic
cagtcatttgggtaacactgtctggtaa

SEQ ID NO: 6062 - DNA, 28 bp, Artificial Sequence
  Synthetic
cagtcatttgggtgtagtgtttcctact

SEQ ID NO: 6063 - DNA, 28 bp, Artificial Sequence
  Synthetic
cagtcatttgggtgagatgaagcactgt

SEQ ID NO: 6064 - DNA, 28 bp, Artificial Sequence
  Synthetic
cagtcatttgggtacagtatagatgatg

SEQ ID NO: 6065 - DNA, 28 bp, Artificial Sequence
  Synthetic
cagtcatttggggtccagttttcccagg

SEQ ID NO: 6066 - DNA, 28 bp, Artificial Sequence
  Synthetic
cagtcatttgggtcagtgcatgacagaa

SEQ ID NO: 6067 - DNA, 28 bp, Artificial Sequence
  Synthetic
cagtcatttgggtagcagcacataatgg

SEQ ID NO: 6068 - DNA, 28 bp, Artificial Sequence
  Synthetic
cagtcatttgggtagcagcacgtaaata

SEQ ID NO: 6069 - DNA, 28 bp, Artificial Sequence
  Synthetic
cagtcatttgggactgcagtgaaggcac

SEQ ID NO: 6070 - DNA, 28 bp, Artificial Sequence
  Synthetic
cagtcatttgggcaaagtgcttacagtg

SEQ ID NO: 6071 - DNA, 28 bp, Artificial Sequence
  Synthetic
cagtcatttgggtaaggtgcatctagtg

SEQ ID NO: 6072 - DNA, 28 bp, Artificial Sequence
  Synthetic
cagtcatttgggaacattcaacgctgtc

SEQ ID NO: 6073 - DNA, 28 bp, Artificial Sequence
  Synthetic
cagtcatttgggaacattcattgctgtc

SEQ ID NO: 6074 - DNA, 28 bp, Artificial Sequence
  Synthetic
cagtcatttgggaacattcaacgctgtc

SEQ ID NO: 6075 - DNA, 28 bp, Artificial Sequence
  Synthetic
cagtcatttgggtttggcaatggtagaa

SEQ ID NO: 6076 - DNA, 28 bp, Artificial Sequence
  Synthetic
cagtcatttgggtatggcactggtagaa

SEQ ID NO: 6077 - DNA, 28 bp, Artificial Sequence
  Synthetic
cagtcatttgggtggacggagaactgat

SEQ ID NO: 6078 - DNA, 28 bp, Artificial Sequence
  Synthetic
cagtcatttgggcaaagaattctccttt

SEQ ID NO: 6079 - DNA, 28 bp, Artificial Sequence
  Synthetic
cagtcatttgggtcgtgtcttgtgttgc

SEQ ID NO: 6080 - DNA, 28 bp, Artificial Sequence
  Synthetic
cagtcatttgggcaacggaatcccaaaa

SEQ ID NO: 6081 - DNA, 28 bp, Artificial Sequence
  Synthetic
cagtcatttgggaactggcctacaaagt

SEQ ID NO: 6082 - DNA, 28 bp, Artificial Sequence
  Synthetic
cagtcatttgggtaggtagtttcctgtt

SEQ ID NO: 6083 - DNA, 28 bp, Artificial Sequence
  Synthetic
cagtcatttgggcccagtgtttagacta

SEQ ID NO: 6084 - DNA, 28 bp, Artificial Sequence
  Synthetic
cagtcatttgggtgtgcaaatctatgca

SEQ ID NO: 6085 - DNA, 28 bp, Artificial Sequence
  Synthetic
cagtcatttgggtgtgcaaatccatgca

SEQ ID NO: 6086 - DNA, 28 bp, Artificial Sequence
  Synthetic
cagtcatttgggtaaagtgcttatagtg

SEQ ID NO: 6087 - DNA, 28 bp, Artificial Sequence
  Synthetic
cagtcatttgggtaacactgtctggtaa

SEQ ID NO: 6088 - DNA, 28 bp, Artificial Sequence
  Synthetic
cagtcatttgggcatcttactagacagt

SEQ ID NO: 6089 - DNA, 28 bp, Artificial Sequence
  Synthetic
cagtcatttgggtaatactgcctggtaa

SEQ ID NO: 6090 - DNA, 28 bp, Artificial Sequence
  Synthetic
cagtcatttgggtaatactgccgggtaa

SEQ ID NO: 6091 - DNA, 28 bp, Artificial Sequence
  Synthetic
cagtcatttggggtgaaatgtttaggac

SEQ ID NO: 6092 - DNA, 28 bp, Artificial Sequence
  Synthetic
cagtcatttgggttccctttgtcatcct

SEQ ID NO: 6093 - DNA, 28 bp, Artificial Sequence
  Synthetic
cagtcatttgggtggaatgtaaggaagt

SEQ ID NO: 6094 - DNA, 28 bp, Artificial Sequence
  Synthetic
cagtcatttgggataagacgagcaaaaa

SEQ ID NO: 6095 - DNA, 28 bp, Artificial Sequence
  Synthetic
cagtcatttgggtagcttatcagactga

SEQ ID NO: 6096 - DNA, 28 bp, Artificial Sequence
  Synthetic
cagtcatttgggtaacagtctccagtca

SEQ ID NO: 6097 - DNA, 28 bp, Artificial Sequence
  Synthetic
cagtcatttgggacagcaggcacagaca

SEQ ID NO: 6098 - DNA, 28 bp, Artificial Sequence
  Synthetic
cagtcatttgggtaatctcagctggcaa

SEQ ID NO: 6099 - DNA, 28 bp, Artificial Sequence
  Synthetic
cagtcatttgggtactgcatcaggaact

SEQ ID NO: 6100 - DNA, 28 bp, Artificial Sequence
  Synthetic
cagtcatttgggttgtgcttgatctaac

SEQ ID NO: 6101 - DNA, 28 bp, Artificial Sequence
  Synthetic
cagtcatttgggtgattgtccaaacgca

SEQ ID NO: 6102 - DNA, 28 bp, Artificial Sequence
  Synthetic
cagtcatttgggaagctgccagttgaag

SEQ ID NO: 6103 - DNA, 28 bp, Artificial Sequence
  Synthetic
cagtcatttgggagctacattgtctgct

SEQ ID NO: 6104 - DNA, 28 bp, Artificial Sequence
  Synthetic
cagtcatttgggagctacatctggctac

SEQ ID NO: 6105 - DNA, 28 bp, Artificial Sequence
  Synthetic
cagtcatttgggtgtcagtttgtcaaat

SEQ ID NO: 6106 - DNA, 28 bp, Artificial Sequence
  Synthetic
cagtcatttgggatcacattgccaggga

SEQ ID NO: 6107 - DNA, 28 bp, Artificial Sequence
  Synthetic
cagtcatttgggatcacattgccaggga

SEQ ID NO: 6108 - DNA, 28 bp, Artificial Sequence
  Synthetic
cagtcatttgggtggctcagttcagcag

SEQ ID NO: 6109 - DNA, 28 bp, Artificial Sequence
  Synthetic
cagtcatttgggcattgcacttgtctcg

SEQ ID NO: 6110 - DNA, 28 bp, Artificial Sequence
  Synthetic
cagtcatttgggttcacagtggctaagt

SEQ ID NO: 6111 - DNA, 28 bp, Artificial Sequence
  Synthetic
cagtcatttgggttcacagtggctaagt

SEQ ID NO: 6112 - DNA, 28 bp, Artificial Sequence
  Synthetic
cagtcatttgggtagcaccatttgaaat

SEQ ID NO: 6113 - DNA, 28 bp, Artificial Sequence
  Synthetic
cagtcatttgggtagcaccatttgaaat

SEQ ID NO: 6114 - DNA, 28 bp, Artificial Sequence
  Synthetic
cagtcatttgggtaagtgcttccatgtt

SEQ ID NO: 6115 - DNA, 28 bp, Artificial Sequence
  Synthetic
cagtcatttgggtaagtgcttccatgtt

SEQ ID NO: 6116 - DNA, 28 bp, Artificial Sequence
  Synthetic
cagtcatttgggtaagtgcttccatgtt

SEQ ID NO: 6117 - DNA, 28 bp, Artificial Sequence
  Synthetic
cagtcatttgggtaagtgcttccatgtt

SEQ ID NO: 6118 - DNA, 28 bp, Artificial Sequence
  Synthetic
cagtcatttgggtgtaaacatcctcgac

SEQ ID NO: 6119 - DNA, 28 bp, Artificial Sequence
  Synthetic
cagtcatttgggggaggcaagatgttgg

SEQ ID NO: 6120 - DNA, 28 bp, Artificial Sequence
  Synthetic
cagtcatttgggtattgcacattactaa

SEQ ID NO: 6121 - DNA, 28 bp, Artificial Sequence
  Synthetic
cagtcatttgggtccagcatcagtgatt

SEQ ID NO: 6122 - DNA, 28 bp, Artificial Sequence
  Synthetic
cagtcatttgggtggcagtgtcttagct

SEQ ID NO: 6123 - DNA, 28 bp, Artificial Sequence
  Synthetic
cagtcatttgggtaatgcccctaaaaat

SEQ ID NO: 6124 - DNA, 28 bp, Artificial Sequence
  Synthetic
cagtcatttggggaattgcactttagca

SEQ ID NO: 6125 - DNA, 28 bp, Artificial Sequence
  Synthetic
cagtcatttgggttttgttcgttcggct

SEQ ID NO: 6126 - DNA, 28 bp, Artificial Sequence
  Synthetic
cagtcatttgggagatcagaaggtgatt

SEQ ID NO: 6127 - DNA, 28 bp, Artificial Sequence
  Synthetic
cagtcatttgggatcgggaatatcgtgt

SEQ ID NO: 6128 - DNA, 28 bp, Artificial Sequence
  Synthetic
cagtcatttgggtggcagtgtattgtta

SEQ ID NO: 6129 - DNA, 28 bp, Artificial Sequence
  Synthetic
cagtcatttgggaaaccgttaccattac

SEQ ID NO: 6130 - DNA, 28 bp, Artificial Sequence
  Synthetic
cagtcatttgggtggaagactagtgatt

SEQ ID NO: 6131 - DNA, 28 bp, Artificial Sequence
  Synthetic
cagtcatttgggtctttggttatctagc

SEQ ID NO: 6132 - DNA, 28 bp, Artificial Sequence
  Synthetic
cagtcatttgggtaaagctagataaccg

SEQ ID NO: 6133 - DNA, 28 bp, Artificial Sequence
  Synthetic
cagtcatttgggtattgcacttgtcccg

SEQ ID NO: 6134 - DNA, 28 bp, Artificial Sequence
  Synthetic
cagtcatttgggaaagtgctgttcgtgc

SEQ ID NO: 6135 - DNA, 28 bp, Artificial Sequence
  Synthetic
cagtcatttgggtttggcactagcacat

SEQ ID NO: 6136 - DNA, 28 bp, Artificial Sequence
  Synthetic
cagtcatttgggtgcttgttcactgtgc

SEQ ID NO: 6137 - DNA, 28 bp, Artificial Sequence
  Synthetic
cagtcatttggggttgtattctgcccgg

SEQ ID NO: 6138 - DNA, 28 bp, Artificial Sequence
  Synthetic
cagtcatttgggcggactgccgcagaat

SEQ ID NO: 6139 - DNA, 28 bp, Artificial Sequence
  Synthetic
cagtcatttgggatgaaaatgtgaaacc

SEQ ID NO: 6140 - DNA, 28 bp, Artificial Sequence
  Synthetic
cagtcatttgggttaatgctgtatcgga

SEQ ID NO: 6141 - DNA, 28 bp, Artificial Sequence
  Synthetic
cagtcatttgggaatggttctgacagca

SEQ ID NO: 6142 - DNA, 28 bp, Artificial Sequence
  Synthetic
cagtcatttgggtgtgtatcgtggtcgt

SEQ ID NO: 6143 - DNA, 28 bp, Artificial Sequence
  Synthetic
cagtcatttggggagatccctgcgaaat

SEQ ID NO: 6144 - DNA, 28 bp, Artificial Sequence
  Synthetic
cagtcatttgggtcgagatctctacgag

SEQ ID NO: 6145 - DNA, 28 bp, Artificial Sequence
  Synthetic
cagtcatttggggtgacctctacggaac

SEQ ID NO: 6146 - DNA, 28 bp, Artificial Sequence
  Synthetic
cagtcatttgggtagaaatggccgtact

SEQ ID NO: 6147 - DNA, 28 bp, Artificial Sequence
  Synthetic
cagtcatttgggcagaccccctctcccc

SEQ ID NO: 6148 - DNA, 28 bp, Artificial Sequence
  Synthetic
cagtcatttggggaggtgagcaggagtt

SEQ ID NO: 6149 - DNA, 28 bp, Artificial Sequence
  Synthetic
cagtcatttgggtcgaggagcacgtgtt

SEQ ID NO: 6150 - DNA, 28 bp, Artificial Sequence
  Synthetic
cagtcatttgggagagttgagatcgggt

SEQ ID NO: 6151 - DNA, 28 bp, Artificial Sequence
  Synthetic
cagtcatttgggtgaaactgtgtgaggt

SEQ ID NO: 6152 - DNA, 28 bp, Artificial Sequence
  Synthetic
cagtcatttggggatatcgcgcccacct

SEQ ID NO: 6153 - DNA, 28 bp, Artificial Sequence
  Synthetic
cagtcatttgggaaaggtggaggtgcgg

SEQ ID NO: 6154 - DNA, 28 bp, Artificial Sequence
  Synthetic
cagtcatttgggagcactcactgggggt

SEQ ID NO: 6155 - DNA, 28 bp, Artificial Sequence
  Synthetic
cagtcatttgggtcacatttgcctggac

SEQ ID NO: 6156 - DNA, 28 bp, Artificial Sequence
  Synthetic
cagtcatttgggaacccgtagatccgaa

SEQ ID NO: 6157 - DNA, 28 bp, Artificial Sequence
  Synthetic
cagtcatttgggtacagtactgtgataa

SEQ ID NO: 6158 - DNA, 28 bp, Artificial Sequence
  Synthetic
cagtcatttgggagcagcattgtacagg

SEQ ID NO: 6159 - DNA, 28 bp, Artificial Sequence
  Synthetic
cagtcatttgggtcaaatgctcagactc

SEQ ID NO: 6160 - DNA, 28 bp, Artificial Sequence
  Synthetic
cagtcatttgggaaaagtgcttacagtg

SEQ ID NO: 6161 - DNA, 28 bp, Artificial Sequence
  Synthetic
cagtcatttgggtaaagtgctgacagtg

SEQ ID NO: 6162 - DNA, 28 bp, Artificial Sequence
  Synthetic
cagtcatttgggagcagcattgtacagg

SEQ ID NO: 6163 - DNA, 28 bp, Artificial Sequence
  Synthetic
cagtcatttgggttaaggcacgcggtga

SEQ ID NO: 6164 - DNA, 28 bp, Artificial Sequence
  Synthetic
cagtcatttgggtccctgagaccctaac

SEQ ID NO: 6165 - DNA, 28 bp, Artificial Sequence
  Synthetic
cagtcatttgggtcggatccgtctgagc

SEQ ID NO: 6166 - DNA, 28 bp, Artificial Sequence
  Synthetic
cagtcatttgggtcacagtgaaccggtc

SEQ ID NO: 6167 - DNA, 28 bp, Artificial Sequence
  Synthetic
cagtcatttgggcagtgcaatgttaaaa

SEQ ID NO: 6168 - DNA, 28 bp, Artificial Sequence
  Synthetic
cagtcatttgggttgtccccttcaacca

SEQ ID NO: 6169 - DNA, 28 bp, Artificial Sequence
  Synthetic
cagtcatttgggtatggctttttattcc

SEQ ID NO: 6170 - DNA, 28 bp, Artificial Sequence
  Synthetic
cagtcatttgggaacactgtctggtaaa

SEQ ID NO: 6171 - DNA, 28 bp, Artificial Sequence
  Synthetic
cagtcatttggggtccagttttcccagg

SEQ ID NO: 6172 - DNA, 28 bp, Artificial Sequence
  Synthetic
cagtcatttgggttgcatagtcacaaaa

SEQ ID NO: 6173 - DNA, 28 bp, Artificial Sequence
  Synthetic
cagtcatttgggtagcagcacataatgg

SEQ ID NO: 6174 - DNA, 28 bp, Artificial Sequence
  Synthetic
cagtcatttgggtagcagcacatcatgg

SEQ ID NO: 6175 - DNA, 28 bp, Artificial Sequence
  Synthetic
cagtcatttgggtagcagcacgtaaata

SEQ ID NO: 6176 - DNA, 28 bp, Artificial Sequence
  Synthetic
cagtcatttgggactgcagtgaaggcac

SEQ ID NO: 6177 - DNA, 28 bp, Artificial Sequence
  Synthetic
cagtcatttgggcaaagtgcttacagtg

SEQ ID NO: 6178 - DNA, 28 bp, Artificial Sequence
  Synthetic
cagtcatttgggtaaggtgcatctagtg

SEQ ID NO: 6179 - DNA, 28 bp, Artificial Sequence
  Synthetic
cagtcatttgggaacattcaacgctgtc

SEQ ID NO: 6180 - DNA, 28 bp, Artificial Sequence
  Synthetic
cagtcatttgggaccatcgaccgttgat

SEQ ID NO: 6181 - DNA, 28 bp, Artificial Sequence
  Synthetic
cagtcatttgggaacattcattgctgtc

SEQ ID NO: 6182 - DNA, 28 bp, Artificial Sequence
  Synthetic
cagtcatttgggaacattcaacctgtcg

SEQ ID NO: 6183 - DNA, 28 bp, Artificial Sequence
  Synthetic
cagtcatttgggtttggcaatggtagaa

SEQ ID NO: 6184 - DNA, 28 bp, Artificial Sequence
  Synthetic
cagtcatttgggtatggcactggtagaa

SEQ ID NO: 6185 - DNA, 28 bp, Artificial Sequence
  Synthetic
cagtcatttgggcatcccttgcatggtg

SEQ ID NO: 6186 - DNA, 28 bp, Artificial Sequence
  Synthetic
cagtcatttggggtgcctactgagctga

SEQ ID NO: 6187 - DNA, 28 bp, Artificial Sequence
  Synthetic
cagtcatttgggtgatatgtttgatata

SEQ ID NO: 6188 - DNA, 28 bp, Artificial Sequence
  Synthetic
cagtcatttgggtgtaacagcaactcca

SEQ ID NO: 6189 - DNA, 28 bp, Artificial Sequence
  Synthetic
cagtcatttgggtaggtagtttcatgtt

SEQ ID NO: 6190 - DNA, 28 bp, Artificial Sequence
  Synthetic
cagtcatttgggggtccagaggggaaat

SEQ ID NO: 6191 - DNA, 28 bp, Artificial Sequence
  Synthetic
cagtcatttgggcccagtgttcagacta

SEQ ID NO: 6192 - DNA, 28 bp, Artificial Sequence
  Synthetic
cagtcatttgggtgtgcaaatctatgca

SEQ ID NO: 6193 - DNA, 28 bp, Artificial Sequence
  Synthetic
cagtcatttgggtgtgcaaatccatgca

SEQ ID NO: 6194 - DNA, 28 bp, Artificial Sequence
  Synthetic
cagtcatttgggtaaagtgcttatagtg

SEQ ID NO: 6195 - DNA, 28 bp, Artificial Sequence
  Synthetic
cagtcatttgggaatactgccgggtaat

SEQ ID NO: 6196 - DNA, 28 bp, Artificial Sequence
  Synthetic
cagtcatttgggtagcttatcagactga

SEQ ID NO: 6197 - DNA, 28 bp, Artificial Sequence
  Synthetic
cagtcatttgggttccctttgtcatcct

SEQ ID NO: 6198 - DNA, 28 bp, Artificial Sequence
  Synthetic
cagtcatttgggacagcaggcacagaca

SEQ ID NO: 6199 - DNA, 28 bp, Artificial Sequence
  Synthetic
cagtcatttgggatgacctatgaattga

SEQ ID NO: 6200 - DNA, 28 bp, Artificial Sequence
  Synthetic
cagtcatttgggttgtgcttgatctaac

SEQ ID NO: 6201 - DNA, 28 bp, Artificial Sequence
  Synthetic
cagtcatttgggtgattgtccaaacgca

SEQ ID NO: 6202 - DNA, 28 bp, Artificial Sequence
  Synthetic
cagtcatttgggaagctgccagttgaag

SEQ ID NO: 6203 - DNA, 28 bp, Artificial Sequence
  Synthetic
cagtcatttgggccaccaccatgtctga

SEQ ID NO: 6204 - DNA, 28 bp, Artificial Sequence
  Synthetic
cagtcatttgggagctacattgtctgct

SEQ ID NO: 6205 - DNA, 28 bp, Artificial Sequence
  Synthetic
cagtcatttgggtgtcagtttgtcaaat

SEQ ID NO: 6206 - DNA, 28 bp, Artificial Sequence
  Synthetic
cagtcatttgggcaagtcactagtggtt

SEQ ID NO: 6207 - DNA, 28 bp, Artificial Sequence
  Synthetic
cagtcatttgggatcacattgccaggga

SEQ ID NO: 6208 - DNA, 28 bp, Artificial Sequence
  Synthetic
cagtcatttgggtggctcagttcagcag

SEQ ID NO: 6209 - DNA, 28 bp, Artificial Sequence
  Synthetic
cagtcatttgggcattgcacttgtctcg

SEQ ID NO: 6210 - DNA, 28 bp, Artificial Sequence
  Synthetic
cagtcatttgggttcaagtaatccagga

SEQ ID NO: 6211 - DNA, 28 bp, Artificial Sequence
  Synthetic
cagtcatttgggttcacagtggctaagt

SEQ ID NO: 6212 - DNA, 28 bp, Artificial Sequence
  Synthetic
cagtcatttgggaaggagctcacagtct

SEQ ID NO: 6213 - DNA, 28 bp, Artificial Sequence
  Synthetic
cagtcatttgggctagcaccatctgaaa

SEQ ID NO: 6214 - DNA, 28 bp, Artificial Sequence
  Synthetic
cagtcatttgggctttcagtcggatgtt

SEQ ID NO: 6215 - DNA, 28 bp, Artificial Sequence
  Synthetic
cagtcatttgggtgtaaacatcctcgac

SEQ ID NO: 6216 - DNA, 28 bp, Artificial Sequence
  Synthetic
cagtcatttgggtgtaaacatcctacac

SEQ ID NO: 6217 - DNA, 28 bp, Artificial Sequence
  Synthetic
cagtcatttgggggcaagatgctggcat

SEQ ID NO: 6218 - DNA, 28 bp, Artificial Sequence
  Synthetic
cagtcatttgggtattgcacattactaa

SEQ ID NO: 6219 - DNA, 28 bp, Artificial Sequence
  Synthetic
cagtcatttggggtgcattgtagttgca

SEQ ID NO: 6220 - DNA, 28 bp, Artificial Sequence
  Synthetic
cagtcatttgggtggcagtgtcttagct

SEQ ID NO: 6221 - DNA, 28 bp, Artificial Sequence
  Synthetic
cagtcatttgggtattgcacttgtcccg

SEQ ID NO: 6222 - DNA, 28 bp, Artificial Sequence
  Synthetic
cagtcatttgggaaagtgctgttcgtgc

SEQ ID NO: 6223 - DNA, 28 bp, Artificial Sequence
  Synthetic
cagtcatttgggtttggcactagcacat

SEQ ID NO: 6224 - DNA, 28 bp, Artificial Sequence
  Synthetic
cagtcatttgggtgaggtagtaagttgt

SEQ ID NO: 6225 - DNA, 28 bp, Artificial Sequence
  Synthetic
cagtcatttgggaacccgtagatccgat

SEQ ID NO: 6226 - DNA, 28 bp, Artificial Sequence
  Synthetic
cagtcatttgggtgaggtagtaggttgt

SEQ ID NO: 6227 - DNA, 28 bp, Artificial Sequence
  Synthetic
cagtcatttgggtgaggtagtaggttgt

SEQ ID NO: 6228 - DNA, 28 bp, Artificial Sequence
  Synthetic
cagtcatttgggtgaggtagtaggttgt

SEQ ID NO: 6229 - DNA, 28 bp, Artificial Sequence
  Synthetic
cagtcatttgggagaggtagtaggttgc

SEQ ID NO: 6230 - DNA, 28 bp, Artificial Sequence
  Synthetic
cagtcatttgggctatacgacctgctgc

SEQ ID NO: 6231 - DNA, 28 bp, Artificial Sequence
  Synthetic
cagtcatttgggtgaggtaggaggttgt

SEQ ID NO: 6232 - DNA, 28 bp, Artificial Sequence
  Synthetic
cagtcatttgggtgaggtagtagattgt

SEQ ID NO: 6233 - DNA, 28 bp, Artificial Sequence
  Synthetic
cagtcatttgggtgaggtagtagtttgt

SEQ ID NO: 6234 - DNA, 28 bp, Artificial Sequence
  Synthetic
cagtcatttgggtgaggtagtagtttgt

SEQ ID NO: 6235 - DNA, 28 bp, Artificial Sequence
  Synthetic
cagtcatttgggtggaatgtaaagaagt

SEQ ID NO: 6236 - DNA, 28 bp, Artificial Sequence
  Synthetic
cagtcatttgggaacccgtagatccgaa

SEQ ID NO: 6237 - DNA, 28 bp, Artificial Sequence
  Synthetic
cagtcatttgggtacagtactgtgataa

SEQ ID NO: 6238 - DNA, 28 bp, Artificial Sequence
  Synthetic
cagtcatttgggtacagtactgtgatag

SEQ ID NO: 6239 - DNA, 28 bp, Artificial Sequence
  Synthetic
cagtcatttgggagcagcattgtacagg

SEQ ID NO: 6240 - DNA, 28 bp, Artificial Sequence
  Synthetic
cagtcatttgggcaaagtgctaacagtg

SEQ ID NO: 6241 - DNA, 28 bp, Artificial Sequence
  Synthetic
cagtcatttgggtaaagtgctgacagtg

SEQ ID NO: 6242 - DNA, 28 bp, Artificial Sequence
  Synthetic
cagtcatttgggagcagcattgtacagg

SEQ ID NO: 6243 - DNA, 28 bp, Artificial Sequence
  Synthetic
cagtcatttgggtaccctgtagatccga

SEQ ID NO: 6244 - DNA, 28 bp, Artificial Sequence
  Synthetic
cagtcatttgggccctgtagaaccgaat

SEQ ID NO: 6245 - DNA, 28 bp, Artificial Sequence
  Synthetic
cagtcatttgggtggagtgtgacaatgg

SEQ ID NO: 6246 - DNA, 28 bp, Artificial Sequence
  Synthetic
cagtcatttgggtaaggcacgcggtgaa

SEQ ID NO: 6247 - DNA, 28 bp, Artificial Sequence
  Synthetic
cagtcatttgggtccctgagacccttta

SEQ ID NO: 6248 - DNA, 28 bp, Artificial Sequence
  Synthetic
cagtcatttgggtccctgagaccctaac

SEQ ID NO: 6249 - DNA, 28 bp, Artificial Sequence
  Synthetic
cagtcatttgggtcgtaccgtgagtaat

SEQ ID NO: 6250 - DNA, 28 bp, Artificial Sequence
  Synthetic
cagtcatttgggcattattacttttggt

SEQ ID NO: 6251 - DNA, 28 bp, Artificial Sequence
  Synthetic
cagtcatttgggtcggatccgtctgagc

SEQ ID NO: 6252 - DNA, 28 bp, Artificial Sequence
  Synthetic
cagtcatttgggtcacagtgaaccggtc

SEQ ID NO: 6253 - DNA, 28 bp, Artificial Sequence
  Synthetic
cagtcatttgggtcacagtgaaccggtc

SEQ ID NO: 6254 - DNA, 28 bp, Artificial Sequence
  Synthetic
cagtcatttgggaagcccttaccccaaa

SEQ ID NO: 6255 - DNA, 28 bp, Artificial Sequence
  Synthetic
cagtcatttgggctttttgcggtctggg

SEQ ID NO: 6256 - DNA, 28 bp, Artificial Sequence
  Synthetic
cagtcatttgggcagtgcaatgttaaaa

SEQ ID NO: 6257 - DNA, 28 bp, Artificial Sequence
  Synthetic
cagtcatttgggcagtgcaatgatgaaa

SEQ ID NO: 6258 - DNA, 28 bp, Artificial Sequence
  Synthetic
cagtcatttgggtaacagtctacagcca

SEQ ID NO: 6259 - DNA, 28 bp, Artificial Sequence
  Synthetic
cagtcatttgggttggtccccttcaacc

SEQ ID NO: 6260 - DNA, 28 bp, Artificial Sequence
  Synthetic
cagtcatttggggctggtaaaatggaac

SEQ ID NO: 6261 - DNA, 28 bp, Artificial Sequence
  Synthetic
cagtcatttgggttggtccccttcaacc

SEQ ID NO: 6262 - DNA, 28 bp, Artificial Sequence
  Synthetic
cagtcatttgggtgtgactggttgacca

SEQ ID NO: 6263 - DNA, 28 bp, Artificial Sequence
  Synthetic
cagtcatttgggtatggctttttattcc

SEQ ID NO: 6264 - DNA, 28 bp, Artificial Sequence
  Synthetic
cagtcatttgggtatggcttttcattcc

SEQ ID NO: 6265 - DNA, 28 bp, Artificial Sequence
  Synthetic
cagtcatttgggactccatttgttttga

SEQ ID NO: 6266 - DNA, 28 bp, Artificial Sequence
  Synthetic
cagtcatttgggttattgcttaagaata

SEQ ID NO: 6267 - DNA, 28 bp, Artificial Sequence
  Synthetic
cagtcatttgggagctggtgttgtgaat

SEQ ID NO: 6268 - DNA, 28 bp, Artificial Sequence
  Synthetic
cagtcatttgggtctacagtgcacgtgt

SEQ ID NO: 6269 - DNA, 28 bp, Artificial Sequence
  Synthetic
cagtcatttgggcagtggttttacccta

SEQ ID NO: 6270 - DNA, 28 bp, Artificial Sequence
  Synthetic
cagtcatttgggtaccacagggtagaac

SEQ ID NO: 6271 - DNA, 28 bp, Artificial Sequence
  Synthetic
cagtcatttgggtaacactgtctggtaa

SEQ ID NO: 6272 - DNA, 28 bp, Artificial Sequence
  Synthetic
cagtcatttgggtgtagtgtttcctact

SEQ ID NO: 6273 - DNA, 28 bp, Artificial Sequence
  Synthetic
cagtcatttgggcataaagtagaaagca

SEQ ID NO: 6274 - DNA, 28 bp, Artificial Sequence
  Synthetic
cagtcatttgggtgagatgaagcactgt

SEQ ID NO: 6275 - DNA, 28 bp, Artificial Sequence
  Synthetic
cagtcatttgggtacagtatagatgatg

SEQ ID NO: 6276 - DNA, 28 bp, Artificial Sequence
  Synthetic
cagtcatttggggtccagttttcccagg

SEQ ID NO: 6277 - DNA, 28 bp, Artificial Sequence
  Synthetic
cagtcatttgggtgagaactgaattcca

SEQ ID NO: 6278 - DNA, 28 bp, Artificial Sequence
  Synthetic
cagtcatttgggtgagaactgaattcca

SEQ ID NO: 6279 - DNA, 28 bp, Artificial Sequence
  Synthetic
cagtcatttgggtcagtgcactacagaa

SEQ ID NO: 6280 - DNA, 28 bp, Artificial Sequence
  Synthetic
cagtcatttgggtcagtgcatcacagaa

SEQ ID NO: 6281 - DNA, 28 bp, Artificial Sequence
  Synthetic
cagtcatttgggtctggctccgtgtctt

SEQ ID NO: 6282 - DNA, 28 bp, Artificial Sequence
  Synthetic
cagtcatttgggtctcccaacccttgta

SEQ ID NO: 6283 - DNA, 28 bp, Artificial Sequence
  Synthetic
cagtcatttgggctagactgaggctcct

SEQ ID NO: 6284 - DNA, 28 bp, Artificial Sequence
  Synthetic
cagtcatttgggtcagtgcatgacagaa

SEQ ID NO: 6285 - DNA, 28 bp, Artificial Sequence
  Synthetic
cagtcatttgggttgcatagtcacaaaa

SEQ ID NO: 6286 - DNA, 28 bp, Artificial Sequence
  Synthetic
cagtcatttgggtaggttatccgtgttg

SEQ ID NO: 6287 - DNA, 28 bp, Artificial Sequence
  Synthetic
cagtcatttgggttaatgctaattgtga

SEQ ID NO: 6288 - DNA, 28 bp, Artificial Sequence
  Synthetic
cagtcatttgggtagcagcacataatgg

SEQ ID NO: 6289 - DNA, 28 bp, Artificial Sequence
  Synthetic
cagtcatttgggtagcagcacatcatgg

SEQ ID NO: 6290 - DNA, 28 bp, Artificial Sequence
  Synthetic
cagtcatttgggtagcagcacgtaaata

SEQ ID NO: 6291 - DNA, 28 bp, Artificial Sequence
  Synthetic
cagtcatttgggactgcagtgagggcac

SEQ ID NO: 6292 - DNA, 28 bp, Artificial Sequence
  Synthetic
cagtcatttgggcaaagtgcttacagtg

SEQ ID NO: 6293 - DNA, 28 bp, Artificial Sequence
  Synthetic
cagtcatttgggtaaggtgcatctagtg

SEQ ID NO: 6294 - DNA, 28 bp, Artificial Sequence
  Synthetic
cagtcatttgggaacattcaacgctgtc

SEQ ID NO: 6295 - DNA, 28 bp, Artificial Sequence
  Synthetic
cagtcatttgggaccatcgaccgttgat

SEQ ID NO: 6296 - DNA, 28 bp, Artificial Sequence
  Synthetic
cagtcatttgggaacattcattgctgtc

SEQ ID NO: 6297 - DNA, 28 bp, Artificial Sequence
  Synthetic
cagtcatttgggaacattcaacctgtcg

SEQ ID NO: 6298 - DNA, 28 bp, Artificial Sequence
  Synthetic
cagtcatttgggtttggcaatggtagaa

SEQ ID NO: 6299 - DNA, 28 bp, Artificial Sequence
  Synthetic
cagtcatttgggtatggcactggtagaa

SEQ ID NO: 6300 - DNA, 28 bp, Artificial Sequence
  Synthetic
cagtcatttgggtggacggagaactgat

SEQ ID NO: 6301 - DNA, 28 bp, Artificial Sequence
  Synthetic
cagtcatttgggtggagagaaaggcagt

SEQ ID NO: 6302 - DNA, 28 bp, Artificial Sequence
  Synthetic
cagtcatttgggcaaagaattctccttt

SEQ ID NO: 6303 - DNA, 28 bp, Artificial Sequence
  Synthetic
cagtcatttgggtcgtgtcttgtgttgc

SEQ ID NO: 6304 - DNA, 28 bp, Artificial Sequence
  Synthetic
cagtcatttgggcatcccttgcatggtg

SEQ ID NO: 6305 - DNA, 28 bp, Artificial Sequence
  Synthetic
cagtcatttggggtgcctactgagctga

SEQ ID NO: 6306 - DNA, 28 bp, Artificial Sequence
  Synthetic
cagtcatttgggtgatatgtttgatata

SEQ ID NO: 6307 - DNA, 28 bp, Artificial Sequence
  Synthetic
cagtcatttgggcaacggaatcccaaaa

SEQ ID NO: 6308 - DNA, 28 bp, Artificial Sequence
  Synthetic
cagtcatttgggctgacctatgaattga

SEQ ID NO: 6309 - DNA, 28 bp, Artificial Sequence
  Synthetic
cagtcatttgggaactggcctacaaagt

SEQ ID NO: 6310 - DNA, 28 bp, Artificial Sequence
  Synthetic
cagtcatttgggtgtaacagcaactcca

SEQ ID NO: 6311 - DNA, 28 bp, Artificial Sequence
  Synthetic
cagtcatttgggtagcagcacagaaata

SEQ ID NO: 6312 - DNA, 28 bp, Artificial Sequence
  Synthetic
cagtcatttgggtaggtagtttcatgtt

SEQ ID NO: 6313 - DNA, 28 bp, Artificial Sequence
  Synthetic
cagtcatttgggtaggtagtttcctgtt

SEQ ID NO: 6314 - DNA, 28 bp, Artificial Sequence
  Synthetic
cagtcatttgggcccagtgttcagacta

SEQ ID NO: 6315 - DNA, 28 bp, Artificial Sequence
  Synthetic
cagtcatttgggtacagtagtctgcaca

SEQ ID NO: 6316 - DNA, 28 bp, Artificial Sequence
  Synthetic
cagtcatttgggcccagtgtttagacta

SEQ ID NO: 6317 - DNA, 28 bp, Artificial Sequence
  Synthetic
cagtcatttgggtgtgcaaatctatgca

SEQ ID NO: 6318 - DNA, 28 bp, Artificial Sequence
  Synthetic
cagtcatttgggtgtgcaaatccatgca

SEQ ID NO: 6319 - DNA, 28 bp, Artificial Sequence
  Synthetic
cagtcatttgggtaacactgtctggtaa

SEQ ID NO: 6320 - DNA, 28 bp, Artificial Sequence
  Synthetic
cagtcatttgggtaatactgcctggtaa

SEQ ID NO: 6321 - DNA, 28 bp, Artificial Sequence
  Synthetic
cagtcatttgggtaatactgccgggtaa

SEQ ID NO: 6322 - DNA, 28 bp, Artificial Sequence
  Synthetic
cagtcatttgggtactcagtaaggcatt

SEQ ID NO: 6323 - DNA, 28 bp, Artificial Sequence
  Synthetic
cagtcatttgggagaggtatagcgcatg

SEQ ID NO: 6324 - DNA, 28 bp, Artificial Sequence
  Synthetic
cagtcatttgggtgaaatgtttaggacc

SEQ ID NO: 6325 - DNA, 28 bp, Artificial Sequence
  Synthetic
cagtcatttgggttccctttgtcatcct

SEQ ID NO: 6326 - DNA, 28 bp, Artificial Sequence
  Synthetic
cagtcatttgggtccttcattccaccgg

SEQ ID NO: 6327 - DNA, 28 bp, Artificial Sequence
  Synthetic
cagtcatttgggtggaatgtaaggaagt

SEQ ID NO: 6328 - DNA, 28 bp, Artificial Sequence
  Synthetic
cagtcatttggggcttctcctggctctc

SEQ ID NO: 6329 - DNA, 28 bp, Artificial Sequence
  Synthetic
cagtcatttgggataagacgagcaaaaa

SEQ ID NO: 6330 - DNA, 28 bp, Artificial Sequence
  Synthetic
cagtcatttgggtaaagtgcttatagtg

SEQ ID NO: 6331 - DNA, 28 bp, Artificial Sequence
  Synthetic
cagtcatttgggcaaagtgctcatagtg

SEQ ID NO: 6332 - DNA, 28 bp, Artificial Sequence
  Synthetic
cagtcatttgggtagcttatcagactga

SEQ ID NO: 6333 - DNA, 28 bp, Artificial Sequence
  Synthetic
cagtcatttgggctgtgcgtgtgacagc

SEQ ID NO: 6334 - DNA, 28 bp, Artificial Sequence
  Synthetic
cagtcatttgggttccctttgtcatcct

SEQ ID NO: 6335 - DNA, 28 bp, Artificial Sequence
  Synthetic
cagtcatttgggtaacagtctccagtca

SEQ ID NO: 6336 - DNA, 28 bp, Artificial Sequence
  Synthetic
cagtcatttgggacagcaggcacagaca

SEQ ID NO: 6337 - DNA, 28 bp, Artificial Sequence
  Synthetic
cagtcatttgggatgacctatgatttga

SEQ ID NO: 6338 - DNA, 28 bp, Artificial Sequence
  Synthetic
cagtcatttgggtaatctcagctggcaa

SEQ ID NO: 6339 - DNA, 28 bp, Artificial Sequence
  Synthetic
cagtcatttggggggaaatctctgcagg

SEQ ID NO: 6340 - DNA, 28 bp, Artificial Sequence
  Synthetic
cagtcatttgggtactgcatcaggaact

SEQ ID NO: 6341 - DNA, 28 bp, Artificial Sequence
  Synthetic
cagtcatttgggttgtgcttgatctaac

SEQ ID NO: 6342 - DNA, 28 bp, Artificial Sequence
  Synthetic
cagtcatttgggtgattgtccaaacgca

SEQ ID NO: 6343 - DNA, 28 bp, Artificial Sequence
  Synthetic
cagtcatttgggaagctgccagttgaag

SEQ ID NO: 6344 - DNA, 28 bp, Artificial Sequence
  Synthetic
cagtcatttgggagctacattgtctgct

SEQ ID NO: 6345 - DNA, 28 bp, Artificial Sequence
  Synthetic
cagtcatttgggagctacatctggctac

SEQ ID NO: 6346 - DNA, 28 bp, Artificial Sequence
  Synthetic
cagtcatttgggtgtcagtttgtcaaat

SEQ ID NO: 6347 - DNA, 28 bp, Artificial Sequence
  Synthetic
cagtcatttgggtaagtcactagtggtt

SEQ ID NO: 6348 - DNA, 28 bp, Artificial Sequence
  Synthetic
cagtcatttgggatcacattgccaggga

SEQ ID NO: 6349 - DNA, 28 bp, Artificial Sequence
  Synthetic
cagtcatttgggatcacattgccaggga

SEQ ID NO: 6350 - DNA, 28 bp, Artificial Sequence
  Synthetic
cagtcatttgggtggctcagttcagcag

SEQ ID NO: 6351 - DNA, 28 bp, Artificial Sequence
  Synthetic
cagtcatttgggcattgcacttgtctcg

SEQ ID NO: 6352 - DNA, 28 bp, Artificial Sequence
  Synthetic
cagtcatttgggttcaagtaatccagga

SEQ ID NO: 6353 - DNA, 28 bp, Artificial Sequence
  Synthetic
cagtcatttgggttcaagtaattcagga

SEQ ID NO: 6354 - DNA, 28 bp, Artificial Sequence
  Synthetic
cagtcatttgggttcacagtggctaagt

SEQ ID NO: 6355 - DNA, 28 bp, Artificial Sequence
  Synthetic
cagtcatttgggttcacagtggctaagt

SEQ ID NO: 6356 - DNA, 28 bp, Artificial Sequence
  Synthetic
cagtcatttgggaaggagctcacagtct

SEQ ID NO: 6357 - DNA, 28 bp, Artificial Sequence
  Synthetic
cagtcatttgggctcaaactatgggggc

SEQ ID NO: 6358 - DNA, 28 bp, Artificial Sequence
  Synthetic
cagtcatttgggaaagtgcttccacttt

SEQ ID NO: 6359 - DNA, 28 bp, Artificial Sequence
  Synthetic
cagtcatttgggcatcaaagtggaggcc

SEQ ID NO: 6360 - DNA, 28 bp, Artificial Sequence
  Synthetic
cagtcatttgggaaagtgcatccatttt

SEQ ID NO: 6361 - DNA, 28 bp, Artificial Sequence
  Synthetic
cagtcatttggggatcaaagtggaggcc

SEQ ID NO: 6362 - DNA, 28 bp, Artificial Sequence
  Synthetic
cagtcatttgggaagtgccgccaggttt

SEQ ID NO: 6363 - DNA, 28 bp, Artificial Sequence
  Synthetic
cagtcatttgggactcaaactgggggct

SEQ ID NO: 6364 - DNA, 28 bp, Artificial Sequence
  Synthetic
cagtcatttgggagtgccgcagagtttg

SEQ ID NO: 6365 - DNA, 28 bp, Artificial Sequence
  Synthetic
cagtcatttgggaaagtgcttccctttt

SEQ ID NO: 6366 - DNA, 28 bp, Artificial Sequence
  Synthetic
cagtcatttgggaaagtgctactacttt

SEQ ID NO: 6367 - DNA, 28 bp, Artificial Sequence
  Synthetic
cagtcatttgggagggccccccctcaat

SEQ ID NO: 6368 - DNA, 28 bp, Artificial Sequence
  Synthetic
cagtcatttgggatgtatgtgtgcatgt

SEQ ID NO: 6369 - DNA, 28 bp, Artificial Sequence
  Synthetic
cagtcatttgggatgtatgtgtgcatga

SEQ ID NO: 6370 - DNA, 28 bp, Artificial Sequence
  Synthetic
cagtcatttgggggcagaggagggctgt

SEQ ID NO: 6371 - DNA, 28 bp, Artificial Sequence
  Synthetic
cagtcatttgggtggtttaccgtcccac

SEQ ID NO: 6372 - DNA, 28 bp, Artificial Sequence
  Synthetic
cagtcatttgggtagcaccatctgaaat

SEQ ID NO: 6373 - DNA, 28 bp, Artificial Sequence
  Synthetic
cagtcatttgggtagcaccatttgaaat

SEQ ID NO: 6374 - DNA, 28 bp, Artificial Sequence
  Synthetic
cagtcatttgggtagcaccatttgaaat

SEQ ID NO: 6375 - DNA, 28 bp, Artificial Sequence
  Synthetic
cagtcatttgggtatgcaagggcaagct

SEQ ID NO: 6376 - DNA, 28 bp, Artificial Sequence
  Synthetic
cagtcatttgggcagtgcaatagtattg

SEQ ID NO: 6377 - DNA, 28 bp, Artificial Sequence
  Synthetic
cagtcatttgggcagtgcaatggtattg

SEQ ID NO: 6378 - DNA, 28 bp, Artificial Sequence
  Synthetic
cagtcatttgggtaagtgcttccatgtt

SEQ ID NO: 6379 - DNA, 28 bp, Artificial Sequence
  Synthetic
cagtcatttgggaagtgcttccatgttt

SEQ ID NO: 6380 - DNA, 28 bp, Artificial Sequence
  Synthetic
cagtcatttgggactttaacatgggaat

SEQ ID NO: 6381 - DNA, 28 bp, Artificial Sequence
  Synthetic
cagtcatttgggcaagtgcttccatgtt

SEQ ID NO: 6382 - DNA, 28 bp, Artificial Sequence
  Synthetic
cagtcatttgggtttaacatggggttac

SEQ ID NO: 6383 - DNA, 28 bp, Artificial Sequence
  Synthetic
cagtcatttgggaagtgcttccatgttt

SEQ ID NO: 6384 - DNA, 28 bp, Artificial Sequence
  Synthetic
cagtcatttgggctttcagtcggatgtt

SEQ ID NO: 6385 - DNA, 28 bp, Artificial Sequence
  Synthetic
cagtcatttgggtgtaaacatcctcgac

SEQ ID NO: 6386 - DNA, 28 bp, Artificial Sequence
  Synthetic
cagtcatttgggtgtaaacatcctacac

SEQ ID NO: 6387 - DNA, 28 bp, Artificial Sequence
  Synthetic
cagtcatttgggtgtaaacatcctacac

SEQ ID NO: 6388 - DNA, 28 bp, Artificial Sequence
  Synthetic
cagtcatttgggtgtaaacatccccgac

SEQ ID NO: 6389 - DNA, 28 bp, Artificial Sequence
  Synthetic
cagtcatttgggtgtaaacatccttgac

SEQ ID NO: 6390 - DNA, 28 bp, Artificial Sequence
  Synthetic
cagtcatttgggctttcagtcggatgtt

SEQ ID NO: 6391 - DNA, 28 bp, Artificial Sequence
  Synthetic
cagtcatttgggaggcaagatgctggca

SEQ ID NO: 6392 - DNA, 28 bp, Artificial Sequence
  Synthetic
cagtcatttgggtattgcacattactaa

SEQ ID NO: 6393 - DNA, 28 bp, Artificial Sequence
  Synthetic
cagtcatttgggaaaagctgggttgaga

SEQ ID NO: 6394 - DNA, 28 bp, Artificial Sequence
  Synthetic
cagtcatttgggaaacatgaagcgctgc

SEQ ID NO: 6395 - DNA, 28 bp, Artificial Sequence
  Synthetic
cagtcatttggggcacattacacggtcg

SEQ ID NO: 6396 - DNA, 28 bp, Artificial Sequence
  Synthetic
cagtcatttgggccactgccccaggtgc

SEQ ID NO: 6397 - DNA, 28 bp, Artificial Sequence
  Synthetic
cagtcatttgggcgcatcccctagggca

SEQ ID NO: 6398 - DNA, 28 bp, Artificial Sequence
  Synthetic
cagtcatttgggcctagtaggtgctcag

SEQ ID NO: 6399 - DNA, 28 bp, Artificial Sequence
  Synthetic
cagtcatttgggcctctgggcccttcct

SEQ ID NO: 6400 - DNA, 28 bp, Artificial Sequence
  Synthetic
cagtcatttgggctggccctctctgccc

SEQ ID NO: 6401 - DNA, 28 bp, Artificial Sequence
  Synthetic
cagtcatttgggaacacacccagctaac

SEQ ID NO: 6402 - DNA, 28 bp, Artificial Sequence
  Synthetic
cagtcatttggggtgcattgtagttgca

SEQ ID NO: 6403 - DNA, 28 bp, Artificial Sequence
  Synthetic
cagtcatttggggcaaagcacagggcct

SEQ ID NO: 6404 - DNA, 28 bp, Artificial Sequence
  Synthetic
cagtcatttggggcccctgggcctatcc

SEQ ID NO: 6405 - DNA, 28 bp, Artificial Sequence
  Synthetic
cagtcatttgggtcaagagcaataacga

SEQ ID NO: 6406 - DNA, 28 bp, Artificial Sequence
  Synthetic
cagtcatttgggttcagctcctatatga

SEQ ID NO: 6407 - DNA, 28 bp, Artificial Sequence
  Synthetic
cagtcatttgggtccagcatcagtgatt

SEQ ID NO: 6408 - DNA, 28 bp, Artificial Sequence
  Synthetic
cagtcatttgggtccctgtcctccagga

SEQ ID NO: 6409 - DNA, 28 bp, Artificial Sequence
  Synthetic
cagtcatttgggtccgtctcagttactt

SEQ ID NO: 6410 - DNA, 28 bp, Artificial Sequence
  Synthetic
cagtcatttgggtcgatcggtcggtcgg

SEQ ID NO: 6411 - DNA, 28 bp, Artificial Sequence
  Synthetic
cagtcatttgggtctcacacagaaatcg

SEQ ID NO: 6412 - DNA, 28 bp, Artificial Sequence
  Synthetic
cagtcatttgggtgatctagccaaagcc

SEQ ID NO: 6413 - DNA, 28 bp, Artificial Sequence
  Synthetic
cagtcatttgggtgctgacccctagtcc

SEQ ID NO: 6414 - DNA, 28 bp, Artificial Sequence
  Synthetic
cagtcatttgggtgtctgcccgagtgcc

SEQ ID NO: 6415 - DNA, 28 bp, Artificial Sequence
  Synthetic
cagtcatttgggtggcagtgtcttagct

SEQ ID NO: 6416 - DNA, 28 bp, Artificial Sequence
  Synthetic
cagtcatttgggtaggcagtgtaattag

SEQ ID NO: 6417 - DNA, 28 bp, Artificial Sequence
  Synthetic
cagtcatttgggaggcagtgtagttagc

SEQ ID NO: 6418 - DNA, 28 bp, Artificial Sequence
  Synthetic
cagtcatttgggttcacaaagcccatac

SEQ ID NO: 6419 - DNA, 28 bp, Artificial Sequence
  Synthetic
cagtcatttgggtccctgaggagccctt

SEQ ID NO: 6420 - DNA, 28 bp, Artificial Sequence
  Synthetic
cagtcatttgggttatcagaatctccag

SEQ ID NO: 6421 - DNA, 28 bp, Artificial Sequence
  Synthetic
cagtcatttgggaatccttggaacctag

SEQ ID NO: 6422 - DNA, 28 bp, Artificial Sequence
  Synthetic
cagtcatttgggattgcacggtatccat

SEQ ID NO: 6423 - DNA, 28 bp, Artificial Sequence
  Synthetic
cagtcatttgggtaatgcccctaaaaat

SEQ ID NO: 6424 - DNA, 28 bp, Artificial Sequence
  Synthetic
cagtcatttgggaattgcactttagcaa

SEQ ID NO: 6425 - DNA, 28 bp, Artificial Sequence
  Synthetic
cagtcatttgggaataatacatggttga

SEQ ID NO: 6426 - DNA, 28 bp, Artificial Sequence
  Synthetic
cagtcatttgggagatcgaccgtgttat

SEQ ID NO: 6427 - DNA, 28 bp, Artificial Sequence
  Synthetic
cagtcatttggggcctgctggggtggaa

SEQ ID NO: 6428 - DNA, 28 bp, Artificial Sequence
  Synthetic
cagtcatttgggggttgtattatcattg

SEQ ID NO: 6429 - DNA, 28 bp, Artificial Sequence
  Synthetic
cagtcatttgggatataatacaacctgc

SEQ ID NO: 6430 - DNA, 28 bp, Artificial Sequence
  Synthetic
cagtcatttgggtttgttcgttcggctc

SEQ ID NO: 6431 - DNA, 28 bp, Artificial Sequence
  Synthetic
cagtcatttgggatcgtagaggaaaatc

SEQ ID NO: 6432 - DNA, 28 bp, Artificial Sequence
  Synthetic
cagtcatttgggggtagattctccttct

SEQ ID NO: 6433 - DNA, 28 bp, Artificial Sequence
  Synthetic
cagtcatttgggatcatagaggaacatc

SEQ ID NO: 6434 - DNA, 28 bp, Artificial Sequence
  Synthetic
cagtcatttggggtggatattccttcta

SEQ ID NO: 6435 - DNA, 28 bp, Artificial Sequence
  Synthetic
cagtcatttgggaacatagaggaaattt

SEQ ID NO: 6436 - DNA, 28 bp, Artificial Sequence
  Synthetic
cagtcatttgggatcacacaaaggcaac

SEQ ID NO: 6437 - DNA, 28 bp, Artificial Sequence
  Synthetic
cagtcatttgggctcctgactccaggtc

SEQ ID NO: 6438 - DNA, 28 bp, Artificial Sequence
  Synthetic
cagtcatttgggtggtagactatggaac

SEQ ID NO: 6439 - DNA, 28 bp, Artificial Sequence
  Synthetic
cagtcatttgggtatgtagtatggtcca

SEQ ID NO: 6440 - DNA, 28 bp, Artificial Sequence
  Synthetic
cagtcatttgggtggttgaccatagaac

SEQ ID NO: 6441 - DNA, 28 bp, Artificial Sequence
  Synthetic
cagtcatttgggtatacaagggcaagct

SEQ ID NO: 6442 - DNA, 28 bp, Artificial Sequence
  Synthetic
cagtcatttggggaagttgttcgtggtg

SEQ ID NO: 6443 - DNA, 28 bp, Artificial Sequence
  Synthetic
cagtcatttgggagatcagaaggtgact

SEQ ID NO: 6444 - DNA, 28 bp, Artificial Sequence
  Synthetic
cagtcatttgggattcctagaaattgtt

SEQ ID NO: 6445 - DNA, 28 bp, Artificial Sequence
  Synthetic
cagtcatttggggaatgttgctcggtga

SEQ ID NO: 6446 - DNA, 28 bp, Artificial Sequence
  Synthetic
cagtcatttgggaatataacacagatgg

SEQ ID NO: 6447 - DNA, 28 bp, Artificial Sequence
  Synthetic
cagtcatttgggaacacggtccactaac

SEQ ID NO: 6448 - DNA, 28 bp, Artificial Sequence
  Synthetic
cagtcatttgggacttcacctggtccac

SEQ ID NO: 6449 - DNA, 28 bp, Artificial Sequence
  Synthetic
cagtcatttgggctggacttggagtcag

SEQ ID NO: 6450 - DNA, 28 bp, Artificial Sequence
  Synthetic
cagtcatttgggagctcggtctgaggcc

SEQ ID NO: 6451 - DNA, 28 bp, Artificial Sequence
  Synthetic
cagtcatttgggcagcagcaattcatgt

SEQ ID NO: 6452 - DNA, 28 bp, Artificial Sequence
  Synthetic
cagtcatttgggatcgggaatgtcgtgt

SEQ ID NO: 6453 - DNA, 28 bp, Artificial Sequence
  Synthetic
cagtcatttgggtaatactgtctggtaa

SEQ ID NO: 6454 - DNA, 28 bp, Artificial Sequence
  Synthetic
cagtcatttgggtgtcttgcaggccgtc

SEQ ID NO: 6455 - DNA, 28 bp, Artificial Sequence
  Synthetic
cagtcatttgggatcatgatgggctcct

SEQ ID NO: 6456 - DNA, 28 bp, Artificial Sequence
  Synthetic
cagtcatttgggtacggtgagcctgtca

SEQ ID NO: 6457 - DNA, 28 bp, Artificial Sequence
  Synthetic
cagtcatttgggtttgaaccatcactcg

SEQ ID NO: 6458 - DNA, 28 bp, Artificial Sequence
  Synthetic
cagtcatttgggagctcgactcatggtt

SEQ ID NO: 6459 - DNA, 28 bp, Artificial Sequence
  Synthetic
cagtcatttgggttgcatatgtaggatg

SEQ ID NO: 6460 - DNA, 28 bp, Artificial Sequence
  Synthetic
cagtcatttgggtggcagtgtattgtta

SEQ ID NO: 6461 - DNA, 28 bp, Artificial Sequence
  Synthetic
cagtcatttgggaggcagtgcattgcta

SEQ ID NO: 6462 - DNA, 28 bp, Artificial Sequence
  Synthetic
cagtcatttgggtttttgcgatgtgttc

SEQ ID NO: 6463 - DNA, 28 bp, Artificial Sequence
  Synthetic
cagtcatttgggttttgcagtatgttcc

SEQ ID NO: 6464 - DNA, 28 bp, Artificial Sequence
  Synthetic
cagtcatttgggattgggaacattttgc

SEQ ID NO: 6465 - DNA, 28 bp, Artificial Sequence
  Synthetic
cagtcatttgggaaaccgttaccattac

SEQ ID NO: 6466 - DNA, 28 bp, Artificial Sequence
  Synthetic
cagtcatttgggtgtttgcagaggaaac

SEQ ID NO: 6467 - DNA, 28 bp, Artificial Sequence
  Synthetic
cagtcatttgggatgcagtccacgggca

SEQ ID NO: 6468 - DNA, 28 bp, Artificial Sequence
  Synthetic
cagtcatttgggtatgtgcctttggact

SEQ ID NO: 6469 - DNA, 28 bp, Artificial Sequence
  Synthetic
cagtcatttgggtacctaatttgttgtc

SEQ ID NO: 6470 - DNA, 28 bp, Artificial Sequence
  Synthetic
cagtcatttgggtaccaagtttattctg

SEQ ID NO: 6471 - DNA, 28 bp, Artificial Sequence
  Synthetic
cagtcatttgggtatttagaatggcact

SEQ ID NO: 6472 - DNA, 28 bp, Artificial Sequence
  Synthetic
cagtcatttgggatacatacacgcacac

SEQ ID NO: 6473 - DNA, 28 bp, Artificial Sequence
  Synthetic
cagtcatttggggtaagtgcctgcatgt

SEQ ID NO: 6474 - DNA, 28 bp, Artificial Sequence
  Synthetic
cagtcatttgggatatacatacacacac

SEQ ID NO: 6475 - DNA, 28 bp, Artificial Sequence
  Synthetic
cagtcatttgggatatacatacacacac

SEQ ID NO: 6476 - DNA, 28 bp, Artificial Sequence
  Synthetic
cagtcatttgggtatgactgatgtgcgt

SEQ ID NO: 6477 - DNA, 28 bp, Artificial Sequence
  Synthetic
cagtcatttgggtgcctctttcattgat

SEQ ID NO: 6478 - DNA, 28 bp, Artificial Sequence
  Synthetic
cagtcatttgggttcttggactggcact

SEQ ID NO: 6479 - DNA, 28 bp, Artificial Sequence
  Synthetic
cagtcatttgggtacgtagtatagtgct

SEQ ID NO: 6480 - DNA, 28 bp, Artificial Sequence
  Synthetic
cagtcatttgggtcactcctcccctccc

SEQ ID NO: 6481 - DNA, 28 bp, Artificial Sequence
  Synthetic
cagtcatttgggtcaggctcagtcccct

SEQ ID NO: 6482 - DNA, 28 bp, Artificial Sequence
  Synthetic
cagtcatttgggagtcatacacggctct

SEQ ID NO: 6483 - DNA, 28 bp, Artificial Sequence
  Synthetic
cagtcatttgggagaggctggccgtgat

SEQ ID NO: 6484 - DNA, 28 bp, Artificial Sequence
  Synthetic
cagtcatttgggtcctgtactgagctgc

SEQ ID NO: 6485 - DNA, 28 bp, Artificial Sequence
  Synthetic
cagtcatttgggaatcgtacagggtcat

SEQ ID NO: 6486 - DNA, 28 bp, Artificial Sequence
  Synthetic
cagtcatttgggcccagataatagcact

SEQ ID NO: 6487 - DNA, 28 bp, Artificial Sequence
  Synthetic
cagtcatttgggttgaaaggctgtttct

SEQ ID NO: 6488 - DNA, 28 bp, Artificial Sequence
  Synthetic
cagtcatttgggaatgacaccacatata

SEQ ID NO: 6489 - DNA, 28 bp, Artificial Sequence
  Synthetic
cagtcatttgggcaacctggaggactcc

SEQ ID NO: 6490 - DNA, 28 bp, Artificial Sequence
  Synthetic
cagtcatttgggagtggggaacccttcc

SEQ ID NO: 6491 - DNA, 28 bp, Artificial Sequence
  Synthetic
cagtcatttgggtgaaacatacacggga

SEQ ID NO: 6492 - DNA, 28 bp, Artificial Sequence
  Synthetic
cagtcatttgggaaacaaacatggtgca

SEQ ID NO: 6493 - DNA, 28 bp, Artificial Sequence
  Synthetic
cagtcatttgggtgagtattacatggcc

SEQ ID NO: 6494 - DNA, 28 bp, Artificial Sequence
  Synthetic
cagtcatttgggcagcagcacactgtgg

SEQ ID NO: 6495 - DNA, 28 bp, Artificial Sequence
  Synthetic
cagtcatttgggttaagacttgcagtga

SEQ ID NO: 6496 - DNA, 28 bp, Artificial Sequence
  Synthetic
cagtcatttgggatgcacctgggcaagg

SEQ ID NO: 6497 - DNA, 28 bp, Artificial Sequence
  Synthetic
cagtcatttgggaatcctttgtccctgg

SEQ ID NO: 6498 - DNA, 28 bp, Artificial Sequence
  Synthetic
cagtcatttgggaatgcacccgggcaag

SEQ ID NO: 6499 - DNA, 28 bp, Artificial Sequence
  Synthetic
cagtcatttgggtagcagcgggaacagt

SEQ ID NO: 6500 - DNA, 28 bp, Artificial Sequence
  Synthetic
cagtcatttgggcgtcaacacttgctgg

SEQ ID NO: 6501 - DNA, 28 bp, Artificial Sequence
  Synthetic
cagtcatttgggcatgccttgagtgtag

SEQ ID NO: 6502 - DNA, 28 bp, Artificial Sequence
  Synthetic
cagtcatttgggggagaaattatccttg

SEQ ID NO: 6503 - DNA, 28 bp, Artificial Sequence
  Synthetic
cagtcatttgggaggtcagaggtcgatc

SEQ ID NO: 6504 - DNA, 28 bp, Artificial Sequence
  Synthetic
cagtcatttgggaagggattctgatgtt

SEQ ID NO: 6505 - DNA, 28 bp, Artificial Sequence
  Synthetic
cagtcatttgggtgtgacagattgataa

SEQ ID NO: 6506 - DNA, 28 bp, Artificial Sequence
  Synthetic
cagtcatttgggctcggggatcatcatg

SEQ ID NO: 6507 - DNA, 28 bp, Artificial Sequence
  Synthetic
cagtcatttgggaaacattcgcggtgca

SEQ ID NO: 6508 - DNA, 28 bp, Artificial Sequence
  Synthetic
cagtcatttgggatggtggcacggagtc

SEQ ID NO: 6509 - DNA, 28 bp, Artificial Sequence
  Synthetic
cagtcatttgggcttggtacatctttga

SEQ ID NO: 6510 - DNA, 28 bp, Artificial Sequence
  Synthetic
cagtcatttgggcgacccatacttggtt

SEQ ID NO: 6511 - DNA, 28 bp, Artificial Sequence
  Synthetic
cagtcatttgggattgtgtcaatatgcg

SEQ ID NO: 6512 - DNA, 28 bp, Artificial Sequence
  Synthetic
cagtcatttgggtccgagcctgggtctc

SEQ ID NO: 6513 - DNA, 28 bp, Artificial Sequence
  Synthetic
cagtcatttgggaatggcgccactaggg

SEQ ID NO: 6514 - DNA, 28 bp, Artificial Sequence
  Synthetic
cagtcatttgggaccaggaggctgaggt

SEQ ID NO: 6515 - DNA, 28 bp, Artificial Sequence
  Synthetic
cagtcatttgggagcgggcacagctgtg

SEQ ID NO: 6516 - DNA, 28 bp, Artificial Sequence
  Synthetic
cagtcatttgggtgacacctgccaccca

SEQ ID NO: 6517 - DNA, 28 bp, Artificial Sequence
  Synthetic
cagtcatttgggtgtcactcggctcggc

SEQ ID NO: 6518 - DNA, 28 bp, Artificial Sequence
  Synthetic
cagtcatttgggagttgtgtgtgcatgt

SEQ ID NO: 6519 - DNA, 28 bp, Artificial Sequence
  Synthetic
cagtcatttgggagttttgtgtgcatgt

SEQ ID NO: 6520 - DNA, 28 bp, Artificial Sequence
  Synthetic
cagtcatttgggatagttgtgtgtggat

SEQ ID NO: 6521 - DNA, 28 bp, Artificial Sequence
  Synthetic
cagtcatttgggatccctgagtgtatgt

SEQ ID NO: 6522 - DNA, 28 bp, Artificial Sequence
  Synthetic
cagtcatttgggaggaagccctggaggg

SEQ ID NO: 6523 - DNA, 28 bp, Artificial Sequence
  Synthetic
cagtcatttgggtgaggttggtgtactg

SEQ ID NO: 6524 - DNA, 28 bp, Artificial Sequence
  Synthetic
cagtcatttgggctcacagctctggtcc

SEQ ID NO: 6525 - DNA, 28 bp, Artificial Sequence
  Synthetic
cagtcatttggggcactgagatgggagt

SEQ ID NO: 6526 - DNA, 28 bp, Artificial Sequence
  Synthetic
cagtcatttgggcacagctcccatctca

SEQ ID NO: 6527 - DNA, 28 bp, Artificial Sequence
  Synthetic
cagtcatttgggctgtatgccctaaccg

SEQ ID NO: 6528 - DNA, 28 bp, Artificial Sequence
  Synthetic
cagtcatttgggtggtgcggaaagggcc

SEQ ID NO: 6529 - DNA, 28 bp, Artificial Sequence
  Synthetic
cagtcatttgggccgtcctgaggttgtt

SEQ ID NO: 6530 - DNA, 28 bp, Artificial Sequence
  Synthetic
cagtcatttgggactctacaaccttagg

SEQ ID NO: 6531 - DNA, 28 bp, Artificial Sequence
  Synthetic
cagtcatttgggttcagtgatgattagc

SEQ ID NO: 6532 - DNA, 28 bp, Artificial Sequence
  Synthetic
cagtcatttggggtctcggtgcaaggac

SEQ ID NO: 6533 - DNA, 28 bp, Artificial Sequence
  Synthetic
cagtcatttgggggactgtgaggtgact

SEQ ID NO: 6534 - DNA, 28 bp, Artificial Sequence
  Synthetic
cagtcatttggggggcatctgctgacat

SEQ ID NO: 6535 - DNA, 28 bp, Artificial Sequence
  Synthetic
cagtcatttgggcagcctcgctggcagg

SEQ ID NO: 6536 - DNA, 28 bp, Artificial Sequence
  Synthetic
cagtcatttgggctgcagtcacagtgaa

SEQ ID NO: 6537 - DNA, 28 bp, Artificial Sequence
  Synthetic
cagtcatttgggcctgctgtaagctgtg

SEQ ID NO: 6538 - DNA, 28 bp, Artificial Sequence
  Synthetic
cagtcatttgggagttttcccttcaagt

SEQ ID NO: 6539 - DNA, 28 bp, Artificial Sequence
  Synthetic
cagtcatttgggtcaatggctgaggtga

SEQ ID NO: 6540 - DNA, 28 bp, Artificial Sequence
  Synthetic
cagtcatttgggattgcttcccagacgg

SEQ ID NO: 6541 - DNA, 28 bp, Artificial Sequence
  Synthetic
cagtcatttgggctatcctggaatgcag

SEQ ID NO: 6542 - DNA, 28 bp, Artificial Sequence
  Synthetic
cagtcatttgggtcgcaggcgactactt

SEQ ID NO: 6543 - DNA, 28 bp, Artificial Sequence
  Synthetic
cagtcatttgggcgtccccgctcggcgg

SEQ ID NO: 6544 - DNA, 28 bp, Artificial Sequence
  Synthetic
cagtcatttgggaaaggctaggctcaca

SEQ ID NO: 6545 - DNA, 28 bp, Artificial Sequence
  Synthetic
cagtcatttgggattcctgaagagaggc

SEQ ID NO: 6546 - DNA, 28 bp, Artificial Sequence
  Synthetic
cagtcatttgggatctctttgagcgcct

SEQ ID NO: 6547 - DNA, 28 bp, Artificial Sequence
  Synthetic
cagtcatttggggcagctttcagatgtg

SEQ ID NO: 6548 - DNA, 28 bp, Artificial Sequence
  Synthetic
cagtcatttgggcagccacatccgaaag

SEQ ID NO: 6549 - DNA, 28 bp, Artificial Sequence
  Synthetic
cagtcatttgggctgaaaatgttgcctg

SEQ ID NO: 6550 - DNA, 28 bp, Artificial Sequence
  Synthetic
cagtcatttgggagattgggcataggtg

SEQ ID NO: 6551 - DNA, 28 bp, Artificial Sequence
  Synthetic
cagtcatttggggcgtgtgcttgctgtg

SEQ ID NO: 6552 - DNA, 28 bp, Artificial Sequence
  Synthetic
cagtcatttgggaacatcctggtcctgt

SEQ ID NO: 6553 - DNA, 28 bp, Artificial Sequence
  Synthetic
cagtcatttgggcattctcgtttccttc

SEQ ID NO: 6554 - DNA, 28 bp, Artificial Sequence
  Synthetic
cagtcatttgggaggcagtgcgacctgg

SEQ ID NO: 6555 - DNA, 28 bp, Artificial Sequence
  Synthetic
cagtcatttgggtggaagactagtgatt

SEQ ID NO: 6556 - DNA, 28 bp, Artificial Sequence
  Synthetic
cagtcatttgggcacgcgggaaccgagt

SEQ ID NO: 6557 - DNA, 28 bp, Artificial Sequence
  Synthetic
cagtcatttgggttagccgctgaaatag

SEQ ID NO: 6558 - DNA, 28 bp, Artificial Sequence
  Synthetic
cagtcatttgggtgcccaccctttaccc

SEQ ID NO: 6559 - DNA, 28 bp, Artificial Sequence
  Synthetic
cagtcatttgggaaaaccttcagaagga

SEQ ID NO: 6560 - DNA, 28 bp, Artificial Sequence
  Synthetic
cagtcatttgggagacatgtgctctgct

SEQ ID NO: 6561 - DNA, 28 bp, Artificial Sequence
  Synthetic
cagtcatttgggggtgggaggtggggtg

SEQ ID NO: 6562 - DNA, 28 bp, Artificial Sequence
  Synthetic
cagtcatttgggagagaaaccctgtctc

SEQ ID NO: 6563 - DNA, 28 bp, Artificial Sequence
  Synthetic
cagtcatttgggcagtcatgccgcttgc

SEQ ID NO: 6564 - DNA, 28 bp, Artificial Sequence
  Synthetic
cagtcatttgggcaactagactgtgagc

SEQ ID NO: 6565 - DNA, 28 bp, Artificial Sequence
  Synthetic
cagtcatttgggggaggcagaggcagga

SEQ ID NO: 6566 - DNA, 28 bp, Artificial Sequence
  Synthetic
cagtcatttgggccaagtcttggggaga

SEQ ID NO: 6567 - DNA, 28 bp, Artificial Sequence
  Synthetic
cagtcatttggggggacccggggagaga

SEQ ID NO: 6568 - DNA, 28 bp, Artificial Sequence
  Synthetic
cagtcatttgggctccttcacccgggcg

SEQ ID NO: 6569 - DNA, 28 bp, Artificial Sequence
  Synthetic
cagtcatttgggtgcgagtcacccccgg

SEQ ID NO: 6570 - DNA, 28 bp, Artificial Sequence
  Synthetic
cagtcatttgggtgcactgaaggcacac

SEQ ID NO: 6571 - DNA, 28 bp, Artificial Sequence
  Synthetic
cagtcatttgggcgacgagggccggtcg

SEQ ID NO: 6572 - DNA, 28 bp, Artificial Sequence
  Synthetic
cagtcatttgggctccgtgcacaccccc

SEQ ID NO: 6573 - DNA, 28 bp, Artificial Sequence
  Synthetic
cagtcatttgggctcagacagagatacc

SEQ ID NO: 6574 - DNA, 28 bp, Artificial Sequence
  Synthetic
cagtcatttgggcttccgcccggccggg

SEQ ID NO: 6575 - DNA, 28 bp, Artificial Sequence
  Synthetic
cagtcatttgggatctcggctacagaaa

SEQ ID NO: 6576 - DNA, 28 bp, Artificial Sequence
  Synthetic
cagtcatttgggatctcgctggggcctc

SEQ ID NO: 6577 - DNA, 28 bp, Artificial Sequence
  Synthetic
cagtcatttgggcagtgcaattaaaagg

SEQ ID NO: 6578 - DNA, 28 bp, Artificial Sequence
  Synthetic
cagtcatttgggtgcggggctagggcta

SEQ ID NO: 6579 - DNA, 28 bp, Artificial Sequence
  Synthetic
cagtcatttgggtttgtgacctggtcca

SEQ ID NO: 6580 - DNA, 28 bp, Artificial Sequence
  Synthetic
cagtcatttggggcagagtgcaaacaat

SEQ ID NO: 6581 - DNA, 28 bp, Artificial Sequence
  Synthetic
cagtcatttggggaaattcggctctggg

SEQ ID NO: 6582 - DNA, 28 bp, Artificial Sequence
  Synthetic
cagtcatttggggcagcagggtgaaact

SEQ ID NO: 6583 - DNA, 28 bp, Artificial Sequence
  Synthetic
cagtcatttgggggggctggggccggga

SEQ ID NO: 6584 - DNA, 28 bp, Artificial Sequence
  Synthetic
cagtcatttgggccagctgggaagaacc

SEQ ID NO: 6585 - DNA, 28 bp, Artificial Sequence
  Synthetic
cagtcatttgggaggaggccatagtggc

SEQ ID NO: 6586 - DNA, 28 bp, Artificial Sequence
  Synthetic
cagtcatttgggggtgctcacatgtcct

SEQ ID NO: 6587 - DNA, 28 bp, Artificial Sequence
  Synthetic
cagtcatttgggcgtgggcctgacgtgg

SEQ ID NO: 6588 - DNA, 28 bp, Artificial Sequence
  Synthetic
cagtcatttgggtggaagacttgtgatt

SEQ ID NO: 6589 - DNA, 28 bp, Artificial Sequence
  Synthetic
cagtcatttggggattgctgtgcgtgcg

SEQ ID NO: 6590 - DNA, 28 bp, Artificial Sequence
  Synthetic
cagtcatttgggtcagtaacaaagattc

SEQ ID NO: 6591 - DNA, 28 bp, Artificial Sequence
  Synthetic
cagtcatttgggtgtgagttgttcctca

SEQ ID NO: 6592 - DNA, 28 bp, Artificial Sequence
  Synthetic
cagtcatttggggaattgatcaggacat

SEQ ID NO: 6593 - DNA, 28 bp, Artificial Sequence
  Synthetic
cagtcatttgggtctttggttatctagc

SEQ ID NO: 6594 - DNA, 28 bp, Artificial Sequence
  Synthetic
cagtcatttgggtaaagctagataaccg

SEQ ID NO: 6595 - DNA, 28 bp, Artificial Sequence
  Synthetic
cagtcatttgggtattgcacttgtcccg

SEQ ID NO: 6596 - DNA, 28 bp, Artificial Sequence
  Synthetic
cagtcatttgggcaaagtgctgttcgtg

SEQ ID NO: 6597 - DNA, 28 bp, Artificial Sequence
  Synthetic
cagtcatttgggtttggcactagcacat

SEQ ID NO: 6598 - DNA, 28 bp, Artificial Sequence
  Synthetic
cagtcatttgggtgaggtagtaagttgt

SEQ ID NO: 6599 - DNA, 28 bp, Artificial Sequence
  Synthetic
cagtcatttgggacccgtagatccgatc

SEQ ID NO: 6600 - DNA, 28 bp, Artificial Sequence
  Synthetic
cagtcatttgggcacccgtagaaccgac

SEQ ID NO: 6601 - DNA, 28 bp, Artificial Sequence
  Synthetic
cagtcatttgggtacagtactgtgataa

SEQ ID NO: 6602 - DNA, 28 bp, Artificial Sequence
  Synthetic
cagtcatttgggagcagcattgtacagg

SEQ ID NO: 6603 - DNA, 28 bp, Artificial Sequence
  Synthetic
cagtcatttgggtcaaatgctcagactc

SEQ ID NO: 6604 - DNA, 28 bp, Artificial Sequence
  Synthetic
cagtcatttgggaaaagtgcttacagtg

SEQ ID NO: 6605 - DNA, 28 bp, Artificial Sequence
  Synthetic
cagtcatttgggtaaagtgctgacagtg

SEQ ID NO: 6606 - DNA, 28 bp, Artificial Sequence
  Synthetic
cagtcatttgggagcagcattgtacagg

SEQ ID NO: 6607 - DNA, 28 bp, Artificial Sequence
  Synthetic
cagtcatttgggtaccctgtagaaccga

SEQ ID NO: 6608 - DNA, 28 bp, Artificial Sequence
  Synthetic
cagtcatttgggtccctgagaccctaac

SEQ ID NO: 6609 - DNA, 28 bp, Artificial Sequence
  Synthetic
cagtcatttgggtcggatccgtctgagc

SEQ ID NO: 6610 - DNA, 28 bp, Artificial Sequence
  Synthetic
cagtcatttgggcagtgcaatgttaaaa

SEQ ID NO: 6611 - DNA, 28 bp, Artificial Sequence
  Synthetic
cagtcatttgggttggtccccttcaacc

SEQ ID NO: 6612 - DNA, 28 bp, Artificial Sequence
  Synthetic
cagtcatttgggtgtgactggttgacca

SEQ ID NO: 6613 - DNA, 28 bp, Artificial Sequence
  Synthetic
cagtcatttgggagtggttctaccctat

SEQ ID NO: 6614 - DNA, 28 bp, Artificial Sequence
  Synthetic
cagtcatttgggtacagtatagatgatg

SEQ ID NO: 6615 - DNA, 28 bp, Artificial Sequence
  Synthetic
cagtcatttggggtccagttttcccagg

SEQ ID NO: 6616 - DNA, 28 bp, Artificial Sequence
  Synthetic
cagtcatttggggtgtgtggaaatgctt

SEQ ID NO: 6617 - DNA, 28 bp, Artificial Sequence
  Synthetic
cagtcatttgggttgcatagtcacaaaa

SEQ ID NO: 6618 - DNA, 28 bp, Artificial Sequence
  Synthetic
cagtcatttgggtaggttatccgtgttg

SEQ ID NO: 6619 - DNA, 28 bp, Artificial Sequence
  Synthetic
cagtcatttgggtagcagcacataatgg

SEQ ID NO: 6620 - DNA, 28 bp, Artificial Sequence
  Synthetic
cagtcatttgggtagcagcacatcatgg

SEQ ID NO: 6621 - DNA, 28 bp, Artificial Sequence
  Synthetic
cagtcatttgggtagcagcacgtaaata

SEQ ID NO: 6622 - DNA, 28 bp, Artificial Sequence
  Synthetic
cagtcatttgggactgcagtgaaggcac

SEQ ID NO: 6623 - DNA, 28 bp, Artificial Sequence
  Synthetic
cagtcatttgggcaaagtgcttacagtg

SEQ ID NO: 6624 - DNA, 28 bp, Artificial Sequence
  Synthetic
cagtcatttgggtaaggtgcatctagtg

SEQ ID NO: 6625 - DNA, 28 bp, Artificial Sequence
  Synthetic
cagtcatttgggaacattcaacgctgtc

SEQ ID NO: 6626 - DNA, 28 bp, Artificial Sequence
  Synthetic
cagtcatttgggaccatcgaccgttgat

SEQ ID NO: 6627 - DNA, 28 bp, Artificial Sequence
  Synthetic
cagtcatttgggaacattcattgctgtc

SEQ ID NO: 6628 - DNA, 28 bp, Artificial Sequence
  Synthetic
cagtcatttgggtatggcactggtagaa

SEQ ID NO: 6629 - DNA, 28 bp, Artificial Sequence
  Synthetic
cagtcatttgggtggacggagaactgat

SEQ ID NO: 6630 - DNA, 28 bp, Artificial Sequence
  Synthetic
cagtcatttgggtcgtgtcttgtgttgc

SEQ ID NO: 6631 - DNA, 28 bp, Artificial Sequence
  Synthetic
cagtcatttgggcatcccttgcatggtg

SEQ ID NO: 6632 - DNA, 28 bp, Artificial Sequence
  Synthetic
cagtcatttggggtgcctactgagctga

SEQ ID NO: 6633 - DNA, 28 bp, Artificial Sequence
  Synthetic
cagtcatttgggtgtaacagcaactcca

SEQ ID NO: 6634 - DNA, 28 bp, Artificial Sequence
  Synthetic
cagtcatttgggttcaccaccttctcca

SEQ ID NO: 6635 - DNA, 28 bp, Artificial Sequence
  Synthetic
cagtcatttgggggtccagaggggaaat

SEQ ID NO: 6636 - DNA, 28 bp, Artificial Sequence
  Synthetic
cagtcatttgggcccagtgttcagacta

SEQ ID NO: 6637 - DNA, 28 bp, Artificial Sequence
  Synthetic
cagtcatttgggtgtgcaaatctatgca

SEQ ID NO: 6638 - DNA, 28 bp, Artificial Sequence
  Synthetic
cagtcatttgggtgtgcaaatccatgca

SEQ ID NO: 6639 - DNA, 28 bp, Artificial Sequence
  Synthetic
cagtcatttgggtaaagtgcttatagtg

SEQ ID NO: 6640 - DNA, 28 bp, Artificial Sequence
  Synthetic
cagtcatttgggttccctttgtcatcct

SEQ ID NO: 6641 - DNA, 28 bp, Artificial Sequence
  Synthetic
cagtcatttgggtccttcattccaccgg

SEQ ID NO: 6642 - DNA, 28 bp, Artificial Sequence
  Synthetic
cagtcatttgggtggaatgtaaggaagt

SEQ ID NO: 6643 - DNA, 28 bp, Artificial Sequence
  Synthetic
cagtcatttgggtagcttatcagactga

SEQ ID NO: 6644 - DNA, 28 bp, Artificial Sequence
  Synthetic
cagtcatttgggttccctttgtcatcct

SEQ ID NO: 6645 - DNA, 28 bp, Artificial Sequence
  Synthetic
cagtcatttgggacagcaggcacagaca

SEQ ID NO: 6646 - DNA, 28 bp, Artificial Sequence
  Synthetic
cagtcatttgggatgacctatgaattga

SEQ ID NO: 6647 - DNA, 28 bp, Artificial Sequence
  Synthetic
cagtcatttgggttgtgcttgatctaac

SEQ ID NO: 6648 - DNA, 28 bp, Artificial Sequence
  Synthetic
cagtcatttgggaagctgccagttgaag

SEQ ID NO: 6649 - DNA, 28 bp, Artificial Sequence
  Synthetic
cagtcatttgggccaccaccatgtctga

SEQ ID NO: 6650 - DNA, 28 bp, Artificial Sequence
  Synthetic
cagtcatttgggcaagtcactagtggtt

SEQ ID NO: 6651 - DNA, 28 bp, Artificial Sequence
  Synthetic
cagtcatttgggatcacattgccaggga

SEQ ID NO: 6652 - DNA, 28 bp, Artificial Sequence
  Synthetic
cagtcatttgggtggctcagttcagcag

SEQ ID NO: 6653 - DNA, 28 bp, Artificial Sequence
  Synthetic
cagtcatttgggcattgcacttgtctcg

SEQ ID NO: 6654 - DNA, 28 bp, Artificial Sequence
  Synthetic
cagtcatttgggttcaagtaatccagga

SEQ ID NO: 6655 - DNA, 28 bp, Artificial Sequence
  Synthetic
cagtcatttgggttcacagtggctaagt

SEQ ID NO: 6656 - DNA, 28 bp, Artificial Sequence
  Synthetic
cagtcatttgggaaggagctcacagtct

SEQ ID NO: 6657 - DNA, 28 bp, Artificial Sequence
  Synthetic
cagtcatttgggctagcaccatctgaaa

SEQ ID NO: 6658 - DNA, 28 bp, Artificial Sequence
  Synthetic
cagtcatttgggtagcaccatttgaaat

SEQ ID NO: 6659 - DNA, 28 bp, Artificial Sequence
  Synthetic
cagtcatttgggtgtaaacatcctacac

SEQ ID NO: 6660 - DNA, 28 bp, Artificial Sequence
  Synthetic
cagtcatttgggtgtaaacatcctacac

SEQ ID NO: 6661 - DNA, 28 bp, Artificial Sequence
  Synthetic
cagtcatttgggtgtaaacatccccgac

SEQ ID NO: 6662 - DNA, 28 bp, Artificial Sequence
  Synthetic
cagtcatttgggggcaagatgctggcat

SEQ ID NO: 6663 - DNA, 28 bp, Artificial Sequence
  Synthetic
cagtcatttgggtattgcacattactaa

SEQ ID NO: 6664 - DNA, 28 bp, Artificial Sequence
  Synthetic
cagtcatttggggtgcattgtagttgca

SEQ ID NO: 6665 - DNA, 28 bp, Artificial Sequence
  Synthetic
cagtcatttgggtggcagtgtcttagct

SEQ ID NO: 6666 - DNA, 28 bp, Artificial Sequence
  Synthetic
cagtcatttgggtggaagactagtgatt

SEQ ID NO: 6667 - DNA, 28 bp, Artificial Sequence
  Synthetic
cagtcatttgggtctttggttatctagc

SEQ ID NO: 6668 - DNA, 28 bp, Artificial Sequence
  Synthetic
cagtcatttgggtattgcacttgtcccg

SEQ ID NO: 6669 - DNA, 28 bp, Artificial Sequence
  Synthetic
cagtcatttgggaaagtgctgttcgtgc

SEQ ID NO: 6670 - DNA, 28 bp, Artificial Sequence
  Synthetic
cagtcatttgggtttggcactagcacat

SEQ ID NO: 6671 - DNA, 28 bp, Artificial Sequence
  Synthetic
cagtcatttgggaacccgtagatccgat

SEQ ID NO: 6672 - DNA, 28 bp, Artificial Sequence
  Synthetic
cagtcatttgggtgacagaagagagaga

SEQ ID NO: 6673 - DNA, 28 bp, Artificial Sequence
  Synthetic
cagtcatttgggtgcctggctccctgta

SEQ ID NO: 6674 - DNA, 28 bp, Artificial Sequence
  Synthetic
cagtcatttgggtcgataaacctctgca

SEQ ID NO: 6675 - DNA, 28 bp, Artificial Sequence
  Synthetic
cagtcatttgggtcggaccaggcttcat

SEQ ID NO: 6676 - DNA, 28 bp, Artificial Sequence
  Synthetic
cagtcatttgggcagccaaggatgactt

SEQ ID NO: 6677 - DNA, 28 bp, Artificial Sequence
  Synthetic
cagtcatttgggcagccaaggatgactt

SEQ ID NO: 6678 - DNA, 28 bp, Artificial Sequence
  Synthetic
cagtcatttgggtgattgagtcgtgcca

SEQ ID NO: 6679 - DNA, 28 bp, Artificial Sequence
  Synthetic
cagtcatttgggttggactgaagggagc

SEQ ID NO: 6680 - DNA, 28 bp, Artificial Sequence
  Synthetic
cagtcatttgggtccaaagggatcgcat

SEQ ID NO: 6681 - DNA, 28 bp, Artificial Sequence
  Synthetic
cagtcatttgggatgaagtgtttggggg

SEQ ID NO: 6682 - DNA, 28 bp, Artificial Sequence
  Synthetic
cagtcatttgggatgaagtatttggggg

SEQ ID NO: 6683 - DNA, 28 bp, Artificial Sequence
  Synthetic
cagtcatttgggatgaagtgtttggggg

SEQ ID NO: 6684 - DNA, 28 bp, Artificial Sequence
  Synthetic
cagtcatttgggatgaagtgtttggggg

SEQ ID NO: 6685 - DNA, 28 bp, Artificial Sequence
  Synthetic
cagtcatttgggatgaagtgtttggggg

SEQ ID NO: 6686 - DNA, 28 bp, Artificial Sequence
  Synthetic
cagtcatttgggatgaagtgtttggggg

SEQ ID NO: 6687 - DNA, 28 bp, Artificial Sequence
  Synthetic
cagtcatttgggttgaagtgtttggggg

SEQ ID NO: 6688 - DNA, 28 bp, Artificial Sequence
  Synthetic
cagtcatttgggatgaagtgtttggggg

SEQ ID NO: 6689 - DNA, 28 bp, Artificial Sequence
  Synthetic
cagtcatttgggatgaagtgtttggggg

SEQ ID NO: 6690 - DNA, 28 bp, Artificial Sequence
  Synthetic
cagtcatttgggatgaagtgtttggggg

SEQ ID NO: 6691 - DNA, 28 bp, Artificial Sequence
  Synthetic
cagtcatttgggatgaagtgtttggggg

SEQ ID NO: 6692 - DNA, 28 bp, Artificial Sequence
  Synthetic
cagtcatttgggatgaagtgtttggggg

SEQ ID NO: 6693 - DNA, 28 bp, Artificial Sequence
  Synthetic
cagtcatttgggatgaagtgtttggggg

SEQ ID NO: 6694 - DNA, 28 bp, Artificial Sequence
  Synthetic
cagtcatttgggatgaagtgtttggggg

SEQ ID NO: 6695 - DNA, 28 bp, Artificial Sequence
  Synthetic
cagtcatttgggatgaagtgtttggggg

SEQ ID NO: 6696 - DNA, 28 bp, Artificial Sequence
  Synthetic
cagtcatttgggttgaagcgtttggggg

SEQ ID NO: 6697 - DNA, 28 bp, Artificial Sequence
  Synthetic
cagtcatttgggtgccaaaggagatttg

SEQ ID NO: 6698 - DNA, 28 bp, Artificial Sequence
  Synthetic
cagtcatttgggtgccaaaggagagctg

SEQ ID NO: 6699 - DNA, 28 bp, Artificial Sequence
  Synthetic
cagtcatttgggtgccaaaggagatttg

SEQ ID NO: 6700 - DNA, 28 bp, Artificial Sequence
  Synthetic
cagtcatttgggtgccaaaggagagctg

SEQ ID NO: 6701 - DNA, 28 bp, Artificial Sequence
  Synthetic
cagtcatttgggtgccaaaggagatttg

SEQ ID NO: 6702 - DNA, 28 bp, Artificial Sequence
  Synthetic
cagtcatttgggatcggatccgtctgag

SEQ ID NO: 6703 - DNA, 28 bp, Artificial Sequence
  Synthetic
cagtcatttgggactccatttgttttga

SEQ ID NO: 6704 - DNA, 28 bp, Artificial Sequence
  Synthetic
cagtcatttgggtgtcttgcaggccgtc

SEQ ID NO: 6705 - DNA, 28 bp, Artificial Sequence
  Synthetic
cagtcatttgggtcttggagtaggtcat

SEQ ID NO: 6706 - DNA, 28 bp, Artificial Sequence
  Synthetic
cagtcatttgggtgacagaagagagtga

SEQ ID NO: 6707 - DNA, 28 bp, Artificial Sequence
  Synthetic
cagtcatttgggtgacagaagagagtga

SEQ ID NO: 6708 - DNA, 28 bp, Artificial Sequence
  Synthetic
cagtcatttgggtgacagaagagagtga

SEQ ID NO: 6709 - DNA, 28 bp, Artificial Sequence
  Synthetic
cagtcatttgggtgacagaagagagtga

SEQ ID NO: 6710 - DNA, 28 bp, Artificial Sequence
  Synthetic
cagtcatttgggtgacagaagagagtga

SEQ ID NO: 6711 - DNA, 28 bp, Artificial Sequence
  Synthetic
cagtcatttgggtgacagaagagagtga

SEQ ID NO: 6712 - DNA, 28 bp, Artificial Sequence
  Synthetic
cagtcatttgggtgacagaagagagtga

SEQ ID NO: 6713 - DNA, 28 bp, Artificial Sequence
  Synthetic
cagtcatttgggtgacagaagagagtga

SEQ ID NO: 6714 - DNA, 28 bp, Artificial Sequence
  Synthetic
cagtcatttgggtgacagaagagagtga

SEQ ID NO: 6715 - DNA, 28 bp, Artificial Sequence
  Synthetic
cagtcatttgggtgacagaagagagtga

SEQ ID NO: 6716 - DNA, 28 bp, Artificial Sequence
  Synthetic
cagtcatttgggtgacagaagagagaga

SEQ ID NO: 6717 - DNA, 28 bp, Artificial Sequence
  Synthetic
cagtcatttgggcgacagaagagagtga

SEQ ID NO: 6718 - DNA, 28 bp, Artificial Sequence
  Synthetic
cagtcatttgggtttggattgaagggag

SEQ ID NO: 6719 - DNA, 28 bp, Artificial Sequence
  Synthetic
cagtcatttgggtttggattgaagggag

SEQ ID NO: 6720 - DNA, 28 bp, Artificial Sequence
  Synthetic
cagtcatttgggattggattgaagggag

SEQ ID NO: 6721 - DNA, 28 bp, Artificial Sequence
  Synthetic
cagtcatttgggattggattgaagggag

SEQ ID NO: 6722 - DNA, 28 bp, Artificial Sequence
  Synthetic
cagtcatttgggattggattgaagggag

SEQ ID NO: 6723 - DNA, 28 bp, Artificial Sequence
  Synthetic
cagtcatttgggcttggattgaagggag

SEQ ID NO: 6724 - DNA, 28 bp, Artificial Sequence
  Synthetic
cagtcatttgggtgcctggctccctgta

SEQ ID NO: 6725 - DNA, 28 bp, Artificial Sequence
  Synthetic
cagtcatttgggtgcctggctccctgta

SEQ ID NO: 6726 - DNA, 28 bp, Artificial Sequence
  Synthetic
cagtcatttgggtgcctggctccctgta

SEQ ID NO: 6727 - DNA, 28 bp, Artificial Sequence
  Synthetic
cagtcatttgggtgcctggctccctgta

SEQ ID NO: 6728 - DNA, 28 bp, Artificial Sequence
  Synthetic
cagtcatttgggtgcctggctccctgta

SEQ ID NO: 6729 - DNA, 28 bp, Artificial Sequence
  Synthetic
cagtcatttgggtgcctggctccctgaa

SEQ ID NO: 6730 - DNA, 28 bp, Artificial Sequence
  Synthetic
cagtcatttgggtcgataaacctctgca

SEQ ID NO: 6731 - DNA, 28 bp, Artificial Sequence
  Synthetic
cagtcatttgggtcgataagcctctgca

SEQ ID NO: 6732 - DNA, 28 bp, Artificial Sequence
  Synthetic
cagtcatttgggtggagaagcagggcac

SEQ ID NO: 6733 - DNA, 28 bp, Artificial Sequence
  Synthetic
cagtcatttgggtggagaagcagggcac

SEQ ID NO: 6734 - DNA, 28 bp, Artificial Sequence
  Synthetic
cagtcatttgggtggagaagcagggtac

SEQ ID NO: 6735 - DNA, 28 bp, Artificial Sequence
  Synthetic
cagtcatttgggtggagaagcagggcac

SEQ ID NO: 6736 - DNA, 28 bp, Artificial Sequence
  Synthetic
cagtcatttgggtggagaagcagggcac

SEQ ID NO: 6737 - DNA, 28 bp, Artificial Sequence
  Synthetic
cagtcatttgggtggagaagcagggcac

SEQ ID NO: 6738 - DNA, 28 bp, Artificial Sequence
  Synthetic
cagtcatttgggtcggaccaggcttcat

SEQ ID NO: 6739 - DNA, 28 bp, Artificial Sequence
  Synthetic
cagtcatttgggtcggaccaggcttcat

SEQ ID NO: 6740 - DNA, 28 bp, Artificial Sequence
  Synthetic
cagtcatttgggtcggaccaggcttcat

SEQ ID NO: 6741 - DNA, 28 bp, Artificial Sequence
  Synthetic
cagtcatttgggtcggaccaggcttcat

SEQ ID NO: 6742 - DNA, 28 bp, Artificial Sequence
  Synthetic
cagtcatttgggtcgaaccaggcttcat

SEQ ID NO: 6743 - DNA, 28 bp, Artificial Sequence
  Synthetic
cagtcatttgggtcggaccaggcttcat

SEQ ID NO: 6744 - DNA, 28 bp, Artificial Sequence
  Synthetic
cagtcatttgggtcggaccaggcttcat

SEQ ID NO: 6745 - DNA, 28 bp, Artificial Sequence
  Synthetic
cagtcatttgggtcggaccaggcttcat

SEQ ID NO: 6746 - DNA, 28 bp, Artificial Sequence
  Synthetic
cagtcatttgggtcggatcaggcttcat

SEQ ID NO: 6747 - DNA, 28 bp, Artificial Sequence
  Synthetic
cagtcatttgggtcggatcaggcttcat

SEQ ID NO: 6748 - DNA, 28 bp, Artificial Sequence
  Synthetic
cagtcatttgggtcggaccaggcttcaa

SEQ ID NO: 6749 - DNA, 28 bp, Artificial Sequence
  Synthetic
cagtcatttgggtcggaccaggcttcaa

SEQ ID NO: 6750 - DNA, 28 bp, Artificial Sequence
  Synthetic
cagtcatttgggtcggaccaggcttcat

SEQ ID NO: 6751 - DNA, 28 bp, Artificial Sequence
  Synthetic
cagtcatttgggtcggaccaggcttcat

SEQ ID NO: 6752 - DNA, 28 bp, Artificial Sequence
  Synthetic
cagtcatttgggtgaagctgccagcatg

SEQ ID NO: 6753 - DNA, 28 bp, Artificial Sequence
  Synthetic
cagtcatttgggtgaagctgccagcatg

SEQ ID NO: 6754 - DNA, 28 bp, Artificial Sequence
  Synthetic
cagtcatttgggtgaagctgccagcatg

SEQ ID NO: 6755 - DNA, 28 bp, Artificial Sequence
  Synthetic
cagtcatttgggtgaagctgccagcatg

SEQ ID NO: 6756 - DNA, 28 bp, Artificial Sequence
  Synthetic
cagtcatttgggtgaagctgccagcatg

SEQ ID NO: 6757 - DNA, 28 bp, Artificial Sequence
  Synthetic
cagtcatttgggtgaagctgccagcatg

SEQ ID NO: 6758 - DNA, 28 bp, Artificial Sequence
  Synthetic
cagtcatttgggtgaagctgccagcatg

SEQ ID NO: 6759 - DNA, 28 bp, Artificial Sequence
  Synthetic
cagtcatttgggtgaagctgccagcatg

SEQ ID NO: 6760 - DNA, 28 bp, Artificial Sequence
  Synthetic
cagtcatttgggtgaagctgccagcatg

SEQ ID NO: 6761 - DNA, 28 bp, Artificial Sequence
  Synthetic
cagtcatttgggtgaagctgccagcatg

SEQ ID NO: 6762 - DNA, 28 bp, Artificial Sequence
  Synthetic
cagtcatttgggtcgcttggtgcagatc

SEQ ID NO: 6763 - DNA, 28 bp, Artificial Sequence
  Synthetic
cagtcatttgggaggcttggtgcagctc

SEQ ID NO: 6764 - DNA, 28 bp, Artificial Sequence
  Synthetic
cagtcatttgggcagccaaggatgactt

SEQ ID NO: 6765 - DNA, 28 bp, Artificial Sequence
  Synthetic
cagtcatttgggcagccaaggatgactt

SEQ ID NO: 6766 - DNA, 28 bp, Artificial Sequence
  Synthetic
cagtcatttgggcagccaaggatgactt

SEQ ID NO: 6767 - DNA, 28 bp, Artificial Sequence
  Synthetic
cagtcatttgggtagccaaggatgaatt

SEQ ID NO: 6768 - DNA, 28 bp, Artificial Sequence
  Synthetic
cagtcatttgggtagccaaggatgactt

SEQ ID NO: 6769 - DNA, 28 bp, Artificial Sequence
  Synthetic
cagtcatttgggtagccaaggatgactt

SEQ ID NO: 6770 - DNA, 28 bp, Artificial Sequence
  Synthetic
cagtcatttgggtagccaaggatgactt

SEQ ID NO: 6771 - DNA, 28 bp, Artificial Sequence
  Synthetic
cagtcatttgggtagccaaggatgactt

SEQ ID NO: 6772 - DNA, 28 bp, Artificial Sequence
  Synthetic
cagtcatttgggtagccaaggatgactt

SEQ ID NO: 6773 - DNA, 28 bp, Artificial Sequence
  Synthetic
cagtcatttgggtagccaaggatgactt

SEQ ID NO: 6774 - DNA, 28 bp, Artificial Sequence
  Synthetic
cagtcatttgggtagccaaggatgactt

SEQ ID NO: 6775 - DNA, 28 bp, Artificial Sequence
  Synthetic
cagtcatttgggtagccaaggatgactt

SEQ ID NO: 6776 - DNA, 28 bp, Artificial Sequence
  Synthetic
cagtcatttgggtagccaaggatgactt

SEQ ID NO: 6777 - DNA, 28 bp, Artificial Sequence
  Synthetic
cagtcatttgggtagccaagaatgactt

SEQ ID NO: 6778 - DNA, 28 bp, Artificial Sequence
  Synthetic
cagtcatttgggtagccaagaatgactt

SEQ ID NO: 6779 - DNA, 28 bp, Artificial Sequence
  Synthetic
cagtcatttgggtagccaaggacaaact

SEQ ID NO: 6780 - DNA, 28 bp, Artificial Sequence
  Synthetic
cagtcatttgggtagccaaggagactgc

SEQ ID NO: 6781 - DNA, 28 bp, Artificial Sequence
  Synthetic
cagtcatttgggtgattgagccgcgcca

SEQ ID NO: 6782 - DNA, 28 bp, Artificial Sequence
  Synthetic
cagtcatttgggtgattgagccgtgcca

SEQ ID NO: 6783 - DNA, 28 bp, Artificial Sequence
  Synthetic
cagtcatttgggtgattgagccgtgcca

SEQ ID NO: 6784 - DNA, 28 bp, Artificial Sequence
  Synthetic
cagtcatttgggtgattgagccgtgcca

SEQ ID NO: 6785 - DNA, 28 bp, Artificial Sequence
  Synthetic
cagtcatttgggtgattgagccgtgcca

SEQ ID NO: 6786 - DNA, 28 bp, Artificial Sequence
  Synthetic
cagtcatttgggtgattgagccgtgcca

SEQ ID NO: 6787 - DNA, 28 bp, Artificial Sequence
  Synthetic
cagtcatttggggaggtgagccgagcca

SEQ ID NO: 6788 - DNA, 28 bp, Artificial Sequence
  Synthetic
cagtcatttggggtgagccgaaccaata

SEQ ID NO: 6789 - DNA, 28 bp, Artificial Sequence
  Synthetic
cagtcatttgggggattgagccgcgtca

SEQ ID NO: 6790 - DNA, 28 bp, Artificial Sequence
  Synthetic
cagtcatttgggagaatcttgatgatgc

SEQ ID NO: 6791 - DNA, 28 bp, Artificial Sequence
  Synthetic
cagtcatttgggggaatcttgatgatgc

SEQ ID NO: 6792 - DNA, 28 bp, Artificial Sequence
  Synthetic
cagtcatttgggtgaatcttgatgatgc

SEQ ID NO: 6793 - DNA, 28 bp, Artificial Sequence
  Synthetic
cagtcatttgggagaatcttgatgatgc

SEQ ID NO: 6794 - DNA, 28 bp, Artificial Sequence
  Synthetic
cagtcatttgggttggactgaagggtgc

SEQ ID NO: 6795 - DNA, 28 bp, Artificial Sequence
  Synthetic
cagtcatttgggttggactgaagggtgc

SEQ ID NO: 6796 - DNA, 28 bp, Artificial Sequence
  Synthetic
cagtcatttgggaagctcaggagggata

SEQ ID NO: 6797 - DNA, 28 bp, Artificial Sequence
  Synthetic
cagtcatttgggtccaaagggatcgcat

SEQ ID NO: 6798 - DNA, 28 bp, Artificial Sequence
  Synthetic
cagtcatttgggtccaaagggatcgcat

SEQ ID NO: 6799 - DNA, 28 bp, Artificial Sequence
  Synthetic
cagtcatttgggttggcattctgtccac

SEQ ID NO: 6800 - DNA, 28 bp, Artificial Sequence
  Synthetic
cagtcatttggggtgaagtgcttggggg

SEQ ID NO: 6801 - DNA, 28 bp, Artificial Sequence
  Synthetic
cagtcatttggggtgaagtgtttggggg

SEQ ID NO: 6802 - DNA, 28 bp, Artificial Sequence
  Synthetic
cagtcatttggggtgaagtgtttggagg

SEQ ID NO: 6803 - DNA, 28 bp, Artificial Sequence
  Synthetic
cagtcatttggggtgaagtgtttggggg

SEQ ID NO: 6804 - DNA, 28 bp, Artificial Sequence
  Synthetic
cagtcatttggggtgaagtgtttggggg

SEQ ID NO: 6805 - DNA, 28 bp, Artificial Sequence
  Synthetic
cagtcatttggggtgaattgtttggggg

SEQ ID NO: 6806 - DNA, 28 bp, Artificial Sequence
  Synthetic
cagtcatttggggtgaagtgtttggggg

SEQ ID NO: 6807 - DNA, 28 bp, Artificial Sequence
  Synthetic
cagtcatttggggtgaagtgtttggggg

SEQ ID NO: 6808 - DNA, 28 bp, Artificial Sequence
  Synthetic
cagtcatttggggtgaagtgtttggggg

SEQ ID NO: 6809 - DNA, 28 bp, Artificial Sequence
  Synthetic
cagtcatttggggtgaagtgtttggggg

SEQ ID NO: 6810 - DNA, 28 bp, Artificial Sequence
  Synthetic
cagtcatttggggtgaagtgtttggggg

SEQ ID NO: 6811 - DNA, 28 bp, Artificial Sequence
  Synthetic
cagtcatttggggtgaagtgtttggggg

SEQ ID NO: 6812 - DNA, 28 bp, Artificial Sequence
  Synthetic
cagtcatttggggtgaagtgtttggggg

SEQ ID NO: 6813 - DNA, 28 bp, Artificial Sequence
  Synthetic
cagtcatttggggtgaagtgtttggggg

SEQ ID NO: 6814 - DNA, 28 bp, Artificial Sequence
  Synthetic
cagtcatttgggatgaagtgtttggagg

SEQ ID NO: 6815 - DNA, 28 bp, Artificial Sequence
  Synthetic
cagtcatttggggtgaagtgtttggggg

SEQ ID NO: 6816 - DNA, 28 bp, Artificial Sequence
  Synthetic
cagtcatttggggtgaagtgtttggggg

SEQ ID NO: 6817 - DNA, 28 bp, Artificial Sequence
  Synthetic
cagtcatttggggtgaagtgtttggggg

SEQ ID NO: 6818 - DNA, 28 bp, Artificial Sequence
  Synthetic
cagtcatttggggtgaagtgtttggggg

SEQ ID NO: 6819 - DNA, 28 bp, Artificial Sequence
  Synthetic
cagtcatttggggtgaagtgtttgggga

SEQ ID NO: 6820 - DNA, 28 bp, Artificial Sequence
  Synthetic
cagtcatttggggtgaagcgtttggggg

SEQ ID NO: 6821 - DNA, 28 bp, Artificial Sequence
  Synthetic
cagtcatttggggtgaagtatttggcgg

SEQ ID NO: 6822 - DNA, 28 bp, Artificial Sequence
  Synthetic
cagtcatttggggtgaagtgtttggggg

SEQ ID NO: 6823 - DNA, 28 bp, Artificial Sequence
  Synthetic
cagtcatttgggttccacagctttcttg

SEQ ID NO: 6824 - DNA, 28 bp, Artificial Sequence
  Synthetic
cagtcatttgggttccacagctttcttg

SEQ ID NO: 6825 - DNA, 28 bp, Artificial Sequence
  Synthetic
cagtcatttgggttccacagctttcttg

SEQ ID NO: 6826 - DNA, 28 bp, Artificial Sequence
  Synthetic
cagtcatttgggtccacaggctttcttg

SEQ ID NO: 6827 - DNA, 28 bp, Artificial Sequence
  Synthetic
cagtcatttgggtccacaggctttcttg

SEQ ID NO: 6828 - DNA, 28 bp, Artificial Sequence
  Synthetic
cagtcatttgggtcattgagtgcagcgt

SEQ ID NO: 6829 - DNA, 28 bp, Artificial Sequence
  Synthetic
cagtcatttgggttattgagtgcagcgt

SEQ ID NO: 6830 - DNA, 28 bp, Artificial Sequence
  Synthetic
cagtcatttgggtgtgttctcaggtcac

SEQ ID NO: 6831 - DNA, 28 bp, Artificial Sequence
  Synthetic
cagtcatttgggtgtgttctcaggtcgc

SEQ ID NO: 6832 - DNA, 28 bp, Artificial Sequence
  Synthetic
cagtcatttgggtgccaaaggagaattg

SEQ ID NO: 6833 - DNA, 28 bp, Artificial Sequence
  Synthetic
cagtcatttgggtgccaaaggagaattg

SEQ ID NO: 6834 - DNA, 28 bp, Artificial Sequence
  Synthetic
cagtcatttgggtgccaaaggagaattg

SEQ ID NO: 6835 - DNA, 28 bp, Artificial Sequence
  Synthetic
cagtcatttgggtgccaaaggagagttg

SEQ ID NO: 6836 - DNA, 28 bp, Artificial Sequence
  Synthetic
cagtcatttgggtgccaaaggagatttg

SEQ ID NO: 6837 - DNA, 28 bp, Artificial Sequence
  Synthetic
cagtcatttgggtgccaaaggagatttg

SEQ ID NO: 6838 - DNA, 28 bp, Artificial Sequence
  Synthetic
cagtcatttgggtgccaaaggagatttg

SEQ ID NO: 6839 - DNA, 28 bp, Artificial Sequence
  Synthetic
cagtcatttgggtgccaaaggagacttg

SEQ ID NO: 6840 - DNA, 28 bp, Artificial Sequence
  Synthetic
cagtcatttgggtgccaaaggagagctg

SEQ ID NO: 6841 - DNA, 28 bp, Artificial Sequence
  Synthetic
cagtcatttgggtgccaaaggagagttg

SEQ ID NO: 6842 - DNA, 28 bp, Artificial Sequence
  Synthetic
cagtcatttgggtgccaaaggaaatttg

SEQ ID NO: 6843 - DNA, 28 bp, Artificial Sequence
  Synthetic
cagtcatttgggctgcactgcctcttcc

SEQ ID NO: 6844 - DNA, 28 bp, Artificial Sequence
  Synthetic
cagtcatttgggctagtttcacttgttc

SEQ ID NO: 6845 - DNA, 28 bp, Artificial Sequence
  Synthetic
cagtcatttgggtcatcctcatcatcat

SEQ ID NO: 6846 - DNA, 28 bp, Artificial Sequence
  Synthetic
cagtcatttgggaacagaacagaagcag

SEQ ID NO: 6847 - DNA, 28 bp, Artificial Sequence
  Synthetic
cagtcatttgggtgttcgtccgtacact

SEQ ID NO: 6848 - DNA, 28 bp, Artificial Sequence
  Synthetic
cagtcatttggggaatgtagtgaatttg

SEQ ID NO: 6849 - DNA, 28 bp, Artificial Sequence
  Synthetic
cagtcatttgggtaatgtgatgatgaaa

SEQ ID NO: 6850 - DNA, 28 bp, Artificial Sequence
  Synthetic
cagtcatttgggtgatgaatgctgacga

SEQ ID NO: 6851 - DNA, 28 bp, Artificial Sequence
  Synthetic
cagtcatttgggtaaattaatcacggaa

SEQ ID NO: 6852 - DNA, 28 bp, Artificial Sequence
  Synthetic
cagtcatttgggttttggaagtttgtcc

SEQ ID NO: 6853 - DNA, 28 bp, Artificial Sequence
  Synthetic
cagtcatttgggttatccggtattggag

SEQ ID NO: 6854 - DNA, 28 bp, Artificial Sequence
  Synthetic
cagtcatttgggaaagttagagaagttt

SEQ ID NO: 6855 - DNA, 28 bp, Artificial Sequence
  Synthetic
cagtcatttgggttcccacgcgttatag

SEQ ID NO: 6856 - DNA, 28 bp, Artificial Sequence
  Synthetic
cagtcatttgggtgtcgaaccgcggttg

SEQ ID NO: 6857 - DNA, 28 bp, Artificial Sequence
  Synthetic
cagtcatttgggtgtcgaaccgcggttg

SEQ ID NO: 6858 - DNA, 28 bp, Artificial Sequence
  Synthetic
cagtcatttgggtgtcgaaccgcggttg

SEQ ID NO: 6859 - DNA, 28 bp, Artificial Sequence
  Synthetic
cagtcatttgggtgtcgaaccgcggttg

SEQ ID NO: 6860 - DNA, 28 bp, Artificial Sequence
  Synthetic
cagtcatttgggtgtcgaaccgcggttg

SEQ ID NO: 6861 - DNA, 28 bp, Artificial Sequence
  Synthetic
cagtcatttgggtgtcgaaccgcggttg

SEQ ID NO: 6862 - DNA, 28 bp, Artificial Sequence
  Synthetic
cagtcatttgggtgtcgaaccgcggttg

SEQ ID NO: 6863 - DNA, 28 bp, Artificial Sequence
  Synthetic
cagtcatttgggtgtcgaaccgcggttg

SEQ ID NO: 6864 - DNA, 28 bp, Artificial Sequence
  Synthetic
cagtcatttgggtgtcgaaccgcggttg

SEQ ID NO: 6865 - DNA, 28 bp, Artificial Sequence
  Synthetic
cagtcatttgggtgtcgaaccgcggttg

SEQ ID NO: 6866 - DNA, 28 bp, Artificial Sequence
  Synthetic
cagtcatttgggagtgtctcctgatgat

SEQ ID NO: 6867 - DNA, 28 bp, Artificial Sequence
  Synthetic
cagtcatttgggtaccatcaatataaat

SEQ ID NO: 6868 - DNA, 28 bp, Artificial Sequence
  Synthetic
cagtcatttgggtaccatcaatataaat

SEQ ID NO: 6869 - DNA, 28 bp, Artificial Sequence
  Synthetic
cagtcatttgggtaccatcaatataaat

SEQ ID NO: 6870 - DNA, 28 bp, Artificial Sequence
  Synthetic
cagtcatttgggtgacgtgtaaattgcg

SEQ ID NO: 6871 - DNA, 28 bp, Artificial Sequence
  Synthetic
cagtcatttgggatcacaatacaataaa

SEQ ID NO: 6872 - DNA, 28 bp, Artificial Sequence
  Synthetic
cagtcatttgggttgctgcctcaagctt

SEQ ID NO: 6873 - DNA, 28 bp, Artificial Sequence
  Synthetic
cagtcatttgggtaaattagtgtataaa

SEQ ID NO: 6874 - DNA, 28 bp, Artificial Sequence
  Synthetic
cagtcatttgggtaaattagtgtataaa

SEQ ID NO: 6875 - DNA, 28 bp, Artificial Sequence
  Synthetic
cagtcatttgggtaaattagtgtataaa

SEQ ID NO: 6876 - DNA, 28 bp, Artificial Sequence
  Synthetic
cagtcatttgggtaaattagtgtataaa

SEQ ID NO: 6877 - DNA, 28 bp, Artificial Sequence
  Synthetic
cagtcatttgggtaaattagtgtataaa

SEQ ID NO: 6878 - DNA, 28 bp, Artificial Sequence
  Synthetic
cagtcatttgggtaaattagtgtataaa

SEQ ID NO: 6879 - DNA, 28 bp, Artificial Sequence
  Synthetic
cagtcatttgggtaaattagtgtataaa

SEQ ID NO: 6880 - DNA, 28 bp, Artificial Sequence
  Synthetic
cagtcatttgggtaaattagtgtataaa

SEQ ID NO: 6881 - DNA, 28 bp, Artificial Sequence
  Synthetic
cagtcatttgggtaaattagtgtataaa

SEQ ID NO: 6882 - DNA, 28 bp, Artificial Sequence
  Synthetic
cagtcatttgggcatcaatatgaatatg

SEQ ID NO: 6883 - DNA, 28 bp, Artificial Sequence
  Synthetic
cagtcatttgggtggaaggggcatgcag

SEQ ID NO: 6884 - DNA, 28 bp, Artificial Sequence
  Synthetic
cagtcatttgggctgtaccctctctctt

SEQ ID NO: 6885 - DNA, 28 bp, Artificial Sequence
  Synthetic
cagtcatttgggaggtgcagaggcagat

SEQ ID NO: 6886 - DNA, 28 bp, Artificial Sequence
  Synthetic
cagtcatttgggctcgccggggctgcgt

SEQ ID NO: 6887 - DNA, 28 bp, Artificial Sequence
  Synthetic
cagtcatttgggtgacaacgagagagag

SEQ ID NO: 6888 - DNA, 28 bp, Artificial Sequence
  Synthetic
cagtcatttgggatgtgctaaaaagtca

SEQ ID NO: 6889 - DNA, 28 bp, Artificial Sequence
  Synthetic
cagtcatttgggatgtgctaaaaagtca

SEQ ID NO: 6890 - DNA, 28 bp, Artificial Sequence
  Synthetic
cagtcatttgggatgtgctaaaaagtca

SEQ ID NO: 6891 - DNA, 28 bp, Artificial Sequence
  Synthetic
cagtcatttgggatgtgctaaaaagtca

SEQ ID NO: 6892 - DNA, 28 bp, Artificial Sequence
  Synthetic
cagtcatttgggatgtgctaaaaagtca

SEQ ID NO: 6893 - DNA, 28 bp, Artificial Sequence
  Synthetic
cagtcatttgggatgtgctaaaaagtca

SEQ ID NO: 6894 - DNA, 28 bp, Artificial Sequence
  Synthetic
cagtcatttgggatgtgctaaaaagtca

SEQ ID NO: 6895 - DNA, 28 bp, Artificial Sequence
  Synthetic
cagtcatttgggatgtgctaaaaagtca

SEQ ID NO: 6896 - DNA, 28 bp, Artificial Sequence
  Synthetic
cagtcatttgggcgtcatctcacaggtg

SEQ ID NO: 6897 - DNA, 28 bp, Artificial Sequence
  Synthetic
cagtcatttgggcgtcatctcacaggtg

SEQ ID NO: 6898 - DNA, 28 bp, Artificial Sequence
  Synthetic
cagtcatttgggcgtcatctcacaggtg

SEQ ID NO: 6899 - DNA, 28 bp, Artificial Sequence
  Synthetic
cagtcatttgggatgaatgtgggaaatg

SEQ ID NO: 6900 - DNA, 28 bp, Artificial Sequence
  Synthetic
cagtcatttgggtgaatgtgagaaatgt

SEQ ID NO: 6901 - DNA, 28 bp, Artificial Sequence
  Synthetic
cagtcatttgggtgaatgtgagaaatgt

SEQ ID NO: 6902 - DNA, 28 bp, Artificial Sequence
  Synthetic
cagtcatttgggtgaatgtgagaaatgt

SEQ ID NO: 6903 - DNA, 28 bp, Artificial Sequence
  Synthetic
cagtcatttgggtgaatgtgagaaatgt

SEQ ID NO: 6904 - DNA, 28 bp, Artificial Sequence
  Synthetic
cagtcatttgggtgaatgtgagaaatgt

SEQ ID NO: 6905 - DNA, 28 bp, Artificial Sequence
  Synthetic
cagtcatttgggtgaatgtgagaaatgt

SEQ ID NO: 6906 - DNA, 28 bp, Artificial Sequence
  Synthetic
cagtcatttgggtgaatgtgagaaatgt

SEQ ID NO: 6907 - DNA, 28 bp, Artificial Sequence
  Synthetic
cagtcatttgggtgaatgtgagaaatgt

SEQ ID NO: 6908 - DNA, 28 bp, Artificial Sequence
  Synthetic
cagtcatttgggtcataagcccaccaca

SEQ ID NO: 6909 - DNA, 28 bp, Artificial Sequence
  Synthetic
cagtcatttgggaccgttagatcgagaa

SEQ ID NO: 6910 - DNA, 28 bp, Artificial Sequence
  Synthetic
cagtcatttgggaccgttagatcgagaa

SEQ ID NO: 6911 - DNA, 28 bp, Artificial Sequence
  Synthetic
cagtcatttgggaccgttagatcgagaa

SEQ ID NO: 6912 - DNA, 28 bp, Artificial Sequence
  Synthetic
cagtcatttggggacggacggttaaacg

SEQ ID NO: 6913 - DNA, 28 bp, Artificial Sequence
  Synthetic
cagtcatttggggacggacggttaaacg

SEQ ID NO: 6914 - DNA, 28 bp, Artificial Sequence
  Synthetic
cagtcatttggggacggacggttaaacg

SEQ ID NO: 6915 - DNA, 28 bp, Artificial Sequence
  Synthetic
cagtcatttggggacggacggttaaacg

SEQ ID NO: 6916 - DNA, 28 bp, Artificial Sequence
  Synthetic
cagtcatttggggacggacggttaaacg

SEQ ID NO: 6917 - DNA, 28 bp, Artificial Sequence
  Synthetic
cagtcatttggggggttatggaatgggt

SEQ ID NO: 6918 - DNA, 28 bp, Artificial Sequence
  Synthetic
cagtcatttgggcacttcatagtacaac

SEQ ID NO: 6919 - DNA, 28 bp, Artificial Sequence
  Synthetic
cagtcatttgggcacttcatagtacaac

SEQ ID NO: 6920 - DNA, 28 bp, Artificial Sequence
  Synthetic
cagtcatttgggcacttcatagtacaac

SEQ ID NO: 6921 - DNA, 28 bp, Artificial Sequence
  Synthetic
cagtcatttgggaaggggattgaggaga

SEQ ID NO: 6922 - DNA, 28 bp, Artificial Sequence
  Synthetic
cagtcatttgggaaggggattgaggaga

SEQ ID NO: 6923 - DNA, 28 bp, Artificial Sequence
  Synthetic
cagtcatttgggaaggggattgaggaga

SEQ ID NO: 6924 - DNA, 28 bp, Artificial Sequence
  Synthetic
cagtcatttggggtgacatattttacta

SEQ ID NO: 6925 - DNA, 28 bp, Artificial Sequence
  Synthetic
cagtcatttgggtccaacttgaggcccg

SEQ ID NO: 6926 - DNA, 28 bp, Artificial Sequence
  Synthetic
cagtcatttgggaatcccttatattatg

SEQ ID NO: 6927 - DNA, 28 bp, Artificial Sequence
  Synthetic
cagtcatttgggaatcccttatattatg

SEQ ID NO: 6928 - DNA, 28 bp, Artificial Sequence
  Synthetic
cagtcatttgggaatcccttatattatg

SEQ ID NO: 6929 - DNA, 28 bp, Artificial Sequence
  Synthetic
cagtcatttgggaatcccttatattatg

SEQ ID NO: 6930 - DNA, 28 bp, Artificial Sequence
  Synthetic
cagtcatttgggaatcccttatattatg

SEQ ID NO: 6931 - DNA, 28 bp, Artificial Sequence
  Synthetic
cagtcatttgggtcaggttataagactt

SEQ ID NO: 6932 - DNA, 28 bp, Artificial Sequence
  Synthetic
cagtcatttgggtcaggttataagactt

SEQ ID NO: 6933 - DNA, 28 bp, Artificial Sequence
  Synthetic
cagtcatttgggtcaggttataagactt

SEQ ID NO: 6934 - DNA, 28 bp, Artificial Sequence
  Synthetic
cagtcatttgggtcaggttataagactt

SEQ ID NO: 6935 - DNA, 28 bp, Artificial Sequence
  Synthetic
cagtcatttgggtcaggttataagactt

SEQ ID NO: 6936 - DNA, 28 bp, Artificial Sequence
  Synthetic
cagtcatttgggtcaggttataagactt

SEQ ID NO: 6937 - DNA, 28 bp, Artificial Sequence
  Synthetic
cagtcatttgggtcaggttataagactt

SEQ ID NO: 6938 - DNA, 28 bp, Artificial Sequence
  Synthetic
cagtcatttgggtcaggttataagactt

SEQ ID NO: 6939 - DNA, 28 bp, Artificial Sequence
  Synthetic
cagtcatttgggtcaggttataagactt

SEQ ID NO: 6940 - DNA, 28 bp, Artificial Sequence
  Synthetic
cagtcatttgggtcaggttataagactt

SEQ ID NO: 6941 - DNA, 28 bp, Artificial Sequence
  Synthetic
cagtcatttgggtcaggttataagactt

SEQ ID NO: 6942 - DNA, 28 bp, Artificial Sequence
  Synthetic
cagtcatttgggcggcctcgtggatgga

SEQ ID NO: 6943 - DNA, 28 bp, Artificial Sequence
  Synthetic
cagtcatttgggcggcctcgtggatgga

SEQ ID NO: 6944 - DNA, 28 bp, Artificial Sequence
  Synthetic
cagtcatttgggcggcctcgtggatgga

SEQ ID NO: 6945 - DNA, 28 bp, Artificial Sequence
  Synthetic
cagtcatttgggaagtcatcaacaaaaa

SEQ ID NO: 6946 - DNA, 28 bp, Artificial Sequence
  Synthetic
cagtcatttgggaagtcatcaacaaaaa

SEQ ID NO: 6947 - DNA, 28 bp, Artificial Sequence
  Synthetic
cagtcatttgggaagtcatcaacaaaaa

SEQ ID NO: 6948 - DNA, 28 bp, Artificial Sequence
  Synthetic
cagtcatttgggtggaatgtaaagaagt

SEQ ID NO: 6949 - DNA, 28 bp, Artificial Sequence
  Synthetic
cagtcatttgggaacccgtagatccgaa

SEQ ID NO: 6950 - DNA, 28 bp, Artificial Sequence
  Synthetic
cagtcatttgggtacagtactgtgataa

SEQ ID NO: 6951 - DNA, 28 bp, Artificial Sequence
  Synthetic
cagtcatttgggagcagcattgtacagg

SEQ ID NO: 6952 - DNA, 28 bp, Artificial Sequence
  Synthetic
cagtcatttgggtcaaatgctcagactc

SEQ ID NO: 6953 - DNA, 28 bp, Artificial Sequence
  Synthetic
cagtcatttgggaaaagtgcttacagtg

SEQ ID NO: 6954 - DNA, 28 bp, Artificial Sequence
  Synthetic
cagtcatttgggtaaagtgctgacagtg

SEQ ID NO: 6955 - DNA, 28 bp, Artificial Sequence
  Synthetic
cagtcatttgggagcagcattgtacagg

SEQ ID NO: 6956 - DNA, 28 bp, Artificial Sequence
  Synthetic
cagtcatttgggtaccctgtagatccga

SEQ ID NO: 6957 - DNA, 28 bp, Artificial Sequence
  Synthetic
cagtcatttgggtaccctgtagaaccga

SEQ ID NO: 6958 - DNA, 28 bp, Artificial Sequence
  Synthetic
cagtcatttgggttaaggcacgcggtga

SEQ ID NO: 6959 - DNA, 28 bp, Artificial Sequence
  Synthetic
cagtcatttgggtccctgagaccctaac

SEQ ID NO: 6960 - DNA, 28 bp, Artificial Sequence
  Synthetic
cagtcatttgggtcacagtgaaccggtc

SEQ ID NO: 6961 - DNA, 28 bp, Artificial Sequence
  Synthetic
cagtcatttgggcagtgcaatgttaaaa

SEQ ID NO: 6962 - DNA, 28 bp, Artificial Sequence
  Synthetic
cagtcatttgggttggtccccttcaacc

SEQ ID NO: 6963 - DNA, 28 bp, Artificial Sequence
  Synthetic
cagtcatttgggtgtgactggttgacca

SEQ ID NO: 6964 - DNA, 28 bp, Artificial Sequence
  Synthetic
cagtcatttgggtatggctttttattcc

SEQ ID NO: 6965 - DNA, 28 bp, Artificial Sequence
  Synthetic
cagtcatttgggactccatttgttttga

SEQ ID NO: 6966 - DNA, 28 bp, Artificial Sequence
  Synthetic
cagtcatttgggtctacagtgcacgtgt

SEQ ID NO: 6967 - DNA, 28 bp, Artificial Sequence
  Synthetic
cagtcatttgggaacactgtctggtaaa

SEQ ID NO: 6968 - DNA, 28 bp, Artificial Sequence
  Synthetic
cagtcatttgggtgagatgaagcactgt

SEQ ID NO: 6969 - DNA, 28 bp, Artificial Sequence
  Synthetic
cagtcatttgggtacagtatagatgatg

SEQ ID NO: 6970 - DNA, 28 bp, Artificial Sequence
  Synthetic
cagtcatttggggtgtgtggaaatgctt

SEQ ID NO: 6971 - DNA, 28 bp, Artificial Sequence
  Synthetic
cagtcatttgggtaggttatccgtgttg

SEQ ID NO: 6972 - DNA, 28 bp, Artificial Sequence
  Synthetic
cagtcatttgggtagcagcacataatgg

SEQ ID NO: 6973 - DNA, 28 bp, Artificial Sequence
  Synthetic
cagtcatttgggtagcagcacatcatgg

SEQ ID NO: 6974 - DNA, 28 bp, Artificial Sequence
  Synthetic
cagtcatttgggtagcagcacgtaaata

SEQ ID NO: 6975 - DNA, 28 bp, Artificial Sequence
  Synthetic
cagtcatttgggactgcagtgaaggcac

SEQ ID NO: 6976 - DNA, 28 bp, Artificial Sequence
  Synthetic
cagtcatttgggcaaagtgcttacagtg

SEQ ID NO: 6977 - DNA, 28 bp, Artificial Sequence
  Synthetic
cagtcatttgggtaaggtgcatctagtg

SEQ ID NO: 6978 - DNA, 28 bp, Artificial Sequence
  Synthetic
cagtcatttgggaacattcaacgctgtc

SEQ ID NO: 6979 - DNA, 28 bp, Artificial Sequence
  Synthetic
cagtcatttgggaccatcgaccgttgat

SEQ ID NO: 6980 - DNA, 28 bp, Artificial Sequence
  Synthetic
cagtcatttgggaacattcattgctgtc

SEQ ID NO: 6981 - DNA, 28 bp, Artificial Sequence
  Synthetic
cagtcatttgggaacattcaacctgtcg

SEQ ID NO: 6982 - DNA, 28 bp, Artificial Sequence
  Synthetic
cagtcatttgggtatggcactggtagaa

SEQ ID NO: 6983 - DNA, 28 bp, Artificial Sequence
  Synthetic
cagtcatttgggcaaagaattctccttt

SEQ ID NO: 6984 - DNA, 28 bp, Artificial Sequence
  Synthetic
cagtcatttgggtcgtgtcttgtgttgc

SEQ ID NO: 6985 - DNA, 28 bp, Artificial Sequence
  Synthetic
cagtcatttgggcatcccttgcatggtg

SEQ ID NO: 6986 - DNA, 28 bp, Artificial Sequence
  Synthetic
cagtcatttggggtgcctactgagctga

SEQ ID NO: 6987 - DNA, 28 bp, Artificial Sequence
  Synthetic
cagtcatttgggtgatatgtttgatata

SEQ ID NO: 6988 - DNA, 28 bp, Artificial Sequence
  Synthetic
cagtcatttgggtagcagcacagaaata

SEQ ID NO: 6989 - DNA, 28 bp, Artificial Sequence
  Synthetic
cagtcatttgggtaggtagtttcatgtt

SEQ ID NO: 6990 - DNA, 28 bp, Artificial Sequence
  Synthetic
cagtcatttgggttcaccaccttctcca

SEQ ID NO: 6991 - DNA, 28 bp, Artificial Sequence
  Synthetic
cagtcatttgggggtccagaggggagat

SEQ ID NO: 6992 - DNA, 28 bp, Artificial Sequence
  Synthetic
cagtcatttgggcccagtgttcagacta

SEQ ID NO: 6993 - DNA, 28 bp, Artificial Sequence
  Synthetic
cagtcatttgggtgtgcaaatctatgca

SEQ ID NO: 6994 - DNA, 28 bp, Artificial Sequence
  Synthetic
cagtcatttgggtgtgcaaatccatgca

SEQ ID NO: 6995 - DNA, 28 bp, Artificial Sequence
  Synthetic
cagtcatttgggtaaagtgcttatagtg

SEQ ID NO: 6996 - DNA, 28 bp, Artificial Sequence
  Synthetic
cagtcatttgggttccctttgtcatcct

SEQ ID NO: 6997 - DNA, 28 bp, Artificial Sequence
  Synthetic
cagtcatttgggtccttcattccaccgg

SEQ ID NO: 6998 - DNA, 28 bp, Artificial Sequence
  Synthetic
cagtcatttgggtagcttatcagactga

SEQ ID NO: 6999 - DNA, 28 bp, Artificial Sequence
  Synthetic
cagtcatttgggacagcaggcacagaca

SEQ ID NO: 7000 - DNA, 28 bp, Artificial Sequence
  Synthetic
cagtcatttgggtaatctcagctggcaa

SEQ ID NO: 7001 - DNA, 28 bp, Artificial Sequence
  Synthetic
cagtcatttgggtactgcatcaggaact

SEQ ID NO: 7002 - DNA, 28 bp, Artificial Sequence
  Synthetic
cagtcatttgggttgtgcttgatctaac

SEQ ID NO: 7003 - DNA, 28 bp, Artificial Sequence
  Synthetic
cagtcatttgggaagctgccagttgaag

SEQ ID NO: 7004 - DNA, 28 bp, Artificial Sequence
  Synthetic
cagtcatttgggccacaccgtatctgac

SEQ ID NO: 7005 - DNA, 28 bp, Artificial Sequence
  Synthetic
cagtcatttgggagctacattgtctgct

SEQ ID NO: 7006 - DNA, 28 bp, Artificial Sequence
  Synthetic
cagtcatttgggtgtcagtttgtcaaat

SEQ ID NO: 7007 - DNA, 28 bp, Artificial Sequence
  Synthetic
cagtcatttgggcaagtcactagtggtt

SEQ ID NO: 7008 - DNA, 28 bp, Artificial Sequence
  Synthetic
cagtcatttgggatcacattgccaggga

SEQ ID NO: 7009 - DNA, 28 bp, Artificial Sequence
  Synthetic
cagtcatttgggatcacattgccaggga

SEQ ID NO: 7010 - DNA, 28 bp, Artificial Sequence
  Synthetic
cagtcatttgggtggctcagttcagcag

SEQ ID NO: 7011 - DNA, 28 bp, Artificial Sequence
  Synthetic
cagtcatttgggcattgcacttgtctcg

SEQ ID NO: 7012 - DNA, 28 bp, Artificial Sequence
  Synthetic
cagtcatttgggttcaagtaatccagga

SEQ ID NO: 7013 - DNA, 28 bp, Artificial Sequence
  Synthetic
cagtcatttgggttcacagtggctaagt

SEQ ID NO: 7014 - DNA, 28 bp, Artificial Sequence
  Synthetic
cagtcatttgggaaggagctcacagtct

SEQ ID NO: 7015 - DNA, 28 bp, Artificial Sequence
  Synthetic
cagtcatttgggctagcaccatctgaaa

SEQ ID NO: 7016 - DNA, 28 bp, Artificial Sequence
  Synthetic
cagtcatttgggtagcaccatttgaaat

SEQ ID NO: 7017 - DNA, 28 bp, Artificial Sequence
  Synthetic
cagtcatttgggctttcagtcggatgtt

SEQ ID NO: 7018 - DNA, 28 bp, Artificial Sequence
  Synthetic
cagtcatttgggtgtaaacatcctcgac

SEQ ID NO: 7019 - DNA, 28 bp, Artificial Sequence
  Synthetic
cagtcatttgggtgtaaacatcctacac

SEQ ID NO: 7020 - DNA, 28 bp, Artificial Sequence
  Synthetic
cagtcatttgggtgtaaacatccccgac

SEQ ID NO: 7021 - DNA, 28 bp, Artificial Sequence
  Synthetic
cagtcatttgggggcaagatgctggcat

SEQ ID NO: 7022 - DNA, 28 bp, Artificial Sequence
  Synthetic
cagtcatttgggtattgcacattactaa

SEQ ID NO: 7023 - DNA, 28 bp, Artificial Sequence
  Synthetic
cagtcatttggggtgcattgtagttgca

SEQ ID NO: 7024 - DNA, 28 bp, Artificial Sequence
  Synthetic
cagtcatttgggtggcagtgtcttagct

SEQ ID NO: 7025 - DNA, 28 bp, Artificial Sequence
  Synthetic
cagtcatttgggtggaagactagtgatt

SEQ ID NO: 7026 - DNA, 28 bp, Artificial Sequence
  Synthetic
cagtcatttgggtattgcacttgtcccg

SEQ ID NO: 7027 - DNA, 28 bp, Artificial Sequence
  Synthetic
cagtcatttgggaaagtgctgttcgtgc

SEQ ID NO: 7028 - DNA, 28 bp, Artificial Sequence
  Synthetic
cagtcatttgggttcaacgggtatttat

SEQ ID NO: 7029 - DNA, 28 bp, Artificial Sequence
  Synthetic
cagtcatttgggtttggcactagcacat

SEQ ID NO: 7030 - DNA, 28 bp, Artificial Sequence
  Synthetic
cagtcatttgggtgaggtagtaagttgt

SEQ ID NO: 7031 - DNA, 28 bp, Artificial Sequence
  Synthetic
cagtcatttgggaacccgtagatccgat

SEQ ID NO: 7032 - DNA, 28 bp, Artificial Sequence
  Synthetic
cagtcatttgggagaagcctttgtggga

SEQ ID NO: 7033 - DNA, 28 bp, Artificial Sequence
  Synthetic
cagtcatttgggagggagggatggttat

SEQ ID NO: 7034 - DNA, 28 bp, Artificial Sequence
  Synthetic
cagtcatttgggcgtgggacagcataga

SEQ ID NO: 7035 - DNA, 28 bp, Artificial Sequence
  Synthetic
cagtcatttggggttggaagccttcgtg

SEQ ID NO: 7036 - DNA, 28 bp, Artificial Sequence
  Synthetic
cagtcatttgggtactatgagaatctcg

SEQ ID NO: 7037 - DNA, 28 bp, Artificial Sequence
  Synthetic
cagtcatttgggtcattgcaaaactgta

SEQ ID NO: 7038 - DNA, 28 bp, Artificial Sequence
  Synthetic
cagtcatttgggtgatggtgatgcgctt

SEQ ID NO: 7039 - DNA, 28 bp, Artificial Sequence
  Synthetic
cagtcatttgggaatttgaagcatgatg

SEQ ID NO: 7040 - DNA, 28 bp, Artificial Sequence
  Synthetic
cagtcatttgggccttagagtcgtaggc

SEQ ID NO: 7041 - DNA, 28 bp, Artificial Sequence
  Synthetic
cagtcatttgggcttcctgcctctcact

SEQ ID NO: 7042 - DNA, 28 bp, Artificial Sequence
  Synthetic
cagtcatttgggcttcctgcctctcact

SEQ ID NO: 7043 - DNA, 28 bp, Artificial Sequence
  Synthetic
cagtcatttgggcttcctgcctctcact

SEQ ID NO: 7044 - DNA, 28 bp, Artificial Sequence
  Synthetic
cagtcatttgggttcctgcctctcacta

SEQ ID NO: 7045 - DNA, 28 bp, Artificial Sequence
  Synthetic
cagtcatttggggaagatagaggagttc

SEQ ID NO: 7046 - DNA, 28 bp, Artificial Sequence
  Synthetic
cagtcatttggggaagatagaggagttc

SEQ ID NO: 7047 - DNA, 28 bp, Artificial Sequence
  Synthetic
cagtcatttgggtggatggtgtgcaggg

SEQ ID NO: 7048 - DNA, 28 bp, Artificial Sequence
  Synthetic
cagtcatttgggttgaaggagttcattg

SEQ ID NO: 7049 - DNA, 28 bp, Artificial Sequence
  Synthetic
cagtcatttgggttgtagagtcatacac

SEQ ID NO: 7050 - DNA, 28 bp, Artificial Sequence
  Synthetic
cagtcatttgggtgacagaagagagtga

SEQ ID NO: 7051 - DNA, 28 bp, Artificial Sequence
  Synthetic
cagtcatttgggcttggactgaagggag

SEQ ID NO: 7052 - DNA, 28 bp, Artificial Sequence
  Synthetic
cagtcatttgggcttggactgaagggag

SEQ ID NO: 7053 - DNA, 28 bp, Artificial Sequence
  Synthetic
cagtcatttgggcttggactgaagggag

SEQ ID NO: 7054 - DNA, 28 bp, Artificial Sequence
  Synthetic
cagtcatttgggcttggactgaagggag

SEQ ID NO: 7055 - DNA, 28 bp, Artificial Sequence
  Synthetic
cagtcatttgggaagctcaggagggata

SEQ ID NO: 7056 - DNA, 28 bp, Artificial Sequence
  Synthetic
cagtcatttgggaagctcaggagggata

SEQ ID NO: 7057 - DNA, 28 bp, Artificial Sequence
  Synthetic
cagtcatttgggagctcaggagggatag

SEQ ID NO: 7058 - DNA, 28 bp, Artificial Sequence
  Synthetic
cagtcatttggggagctggccaggctgt

SEQ ID NO: 7059 - DNA, 28 bp, Artificial Sequence
  Synthetic
cagtcatttggggagctgtccaggctgt

SEQ ID NO: 7060 - DNA, 28 bp, Artificial Sequence
  Synthetic
cagtcatttgggtatgtccattgcagtt

SEQ ID NO: 7061 - DNA, 28 bp, Artificial Sequence
  Synthetic
cagtcatttgggtgacaacgagagagag

SEQ ID NO: 7062 - DNA, 28 bp, Artificial Sequence
  Synthetic
cagtcatttgggtgacaacgagagagag

SEQ ID NO: 7063 - DNA, 28 bp, Artificial Sequence
  Synthetic
cagtcatttgggtgacaacgagagagag

SEQ ID NO: 7064 - DNA, 28 bp, Artificial Sequence
  Synthetic
cagtcatttgggtgacaacgagagagag

SEQ ID NO: 7065 - DNA, 28 bp, Artificial Sequence
  Synthetic
cagtcatttgggttcgtgccaagctgtg

SEQ ID NO: 7066 - DNA, 28 bp, Artificial Sequence
  Synthetic
cagtcatttgggttgaggtgtttctaca

SEQ ID NO: 7067 - DNA, 28 bp, Artificial Sequence
  Synthetic
cagtcatttgggttgaggtgtttctaca

SEQ ID NO: 7068 - DNA, 28 bp, Artificial Sequence
  Synthetic
cagtcatttgggttgcatggagtctatg

SEQ ID NO: 7069 - DNA, 28 bp, Artificial Sequence
  Synthetic
cagtcatttgggttgcatggagtctatg

SEQ ID NO: 7070 - DNA, 28 bp, Artificial Sequence
  Synthetic
cagtcatttgggttgcatggagtctatg

SEQ ID NO: 7071 - DNA, 28 bp, Artificial Sequence
  Synthetic
cagtcatttgggaacccgtagatccgaa

SEQ ID NO: 7072 - DNA, 28 bp, Artificial Sequence
  Synthetic
cagtcatttgggtacagtactgtgataa

SEQ ID NO: 7073 - DNA, 28 bp, Artificial Sequence
  Synthetic
cagtcatttgggagcagcattgtacagg

SEQ ID NO: 7074 - DNA, 28 bp, Artificial Sequence
  Synthetic
cagtcatttgggtcaaatgctcagactc

SEQ ID NO: 7075 - DNA, 28 bp, Artificial Sequence
  Synthetic
cagtcatttgggaaaagtgcttacagtg

SEQ ID NO: 7076 - DNA, 28 bp, Artificial Sequence
  Synthetic
cagtcatttgggtaaagtgctgacagtg

SEQ ID NO: 7077 - DNA, 28 bp, Artificial Sequence
  Synthetic
cagtcatttgggagcagcattgtacagg

SEQ ID NO: 7078 - DNA, 28 bp, Artificial Sequence
  Synthetic
cagtcatttgggtaccccgtagatccga

SEQ ID NO: 7079 - DNA, 28 bp, Artificial Sequence
  Synthetic
cagtcatttgggttaaggcacgcggtga

SEQ ID NO: 7080 - DNA, 28 bp, Artificial Sequence
  Synthetic
cagtcatttgggtccctgagaccctaac

SEQ ID NO: 7081 - DNA, 28 bp, Artificial Sequence
  Synthetic
cagtcatttgggtcggatccgtctgagc

SEQ ID NO: 7082 - DNA, 28 bp, Artificial Sequence
  Synthetic
cagtcatttgggtcacagtgaaccggtc

SEQ ID NO: 7083 - DNA, 28 bp, Artificial Sequence
  Synthetic
cagtcatttgggttgtccccttcaacca

SEQ ID NO: 7084 - DNA, 28 bp, Artificial Sequence
  Synthetic
cagtcatttgggtgtgactggttgacca

SEQ ID NO: 7085 - DNA, 28 bp, Artificial Sequence
  Synthetic
cagtcatttgggtatggctttttattcc

SEQ ID NO: 7086 - DNA, 28 bp, Artificial Sequence
  Synthetic
cagtcatttgggactccatttgttttga

SEQ ID NO: 7087 - DNA, 28 bp, Artificial Sequence
  Synthetic
cagtcatttgggaacactgtctggtaaa

SEQ ID NO: 7088 - DNA, 28 bp, Artificial Sequence
  Synthetic
cagtcatttgggtgagatgaagcactgt

SEQ ID NO: 7089 - DNA, 28 bp, Artificial Sequence
  Synthetic
cagtcatttgggtacagtatagatgatg

SEQ ID NO: 7090 - DNA, 28 bp, Artificial Sequence
  Synthetic
cagtcatttggggtccagttttcccagg

SEQ ID NO: 7091 - DNA, 28 bp, Artificial Sequence
  Synthetic
cagtcatttggggtgtgtggaaatgctt

SEQ ID NO: 7092 - DNA, 28 bp, Artificial Sequence
  Synthetic
cagtcatttgggttgcatagtcacaaaa

SEQ ID NO: 7093 - DNA, 28 bp, Artificial Sequence
  Synthetic
cagtcatttgggtaggttatccgtgttg

SEQ ID NO: 7094 - DNA, 28 bp, Artificial Sequence
  Synthetic
cagtcatttgggtagcagcacataatgg

SEQ ID NO: 7095 - DNA, 28 bp, Artificial Sequence
  Synthetic
cagtcatttgggtagcagcacatcatgg

SEQ ID NO: 7096 - DNA, 28 bp, Artificial Sequence
  Synthetic
cagtcatttgggtagcagcacgtaaata

SEQ ID NO: 7097 - DNA, 28 bp, Artificial Sequence
  Synthetic
cagtcatttgggactgcagtgaaggcac

SEQ ID NO: 7098 - DNA, 28 bp, Artificial Sequence
  Synthetic
cagtcatttgggcaaagtgcttacagtg

SEQ ID NO: 7099 - DNA, 28 bp, Artificial Sequence
  Synthetic
cagtcatttgggtaaggtgcatctagtg

SEQ ID NO: 7100 - DNA, 28 bp, Artificial Sequence
  Synthetic
cagtcatttgggaacattcaacgctgtc

SEQ ID NO: 7101 - DNA, 28 bp, Artificial Sequence
  Synthetic
cagtcatttgggaccatcgaccgttgat

SEQ ID NO: 7102 - DNA, 28 bp, Artificial Sequence
  Synthetic
cagtcatttgggaacattcattgctgtc

SEQ ID NO: 7103 - DNA, 28 bp, Artificial Sequence
  Synthetic
cagtcatttgggtttggcaatggtagaa

SEQ ID NO: 7104 - DNA, 28 bp, Artificial Sequence
  Synthetic
cagtcatttgggtggacggagaactgat

SEQ ID NO: 7105 - DNA, 28 bp, Artificial Sequence
  Synthetic
cagtcatttgggtcgtgtcttgtgttgc

SEQ ID NO: 7106 - DNA, 28 bp, Artificial Sequence
  Synthetic
cagtcatttgggcatcccttgcatggtg

SEQ ID NO: 7107 - DNA, 28 bp, Artificial Sequence
  Synthetic
cagtcatttggggtgcctactgagctga

SEQ ID NO: 7108 - DNA, 28 bp, Artificial Sequence
  Synthetic
cagtcatttgggtgtaacagcaactcca

SEQ ID NO: 7109 - DNA, 28 bp, Artificial Sequence
  Synthetic
cagtcatttgggtaggtagtttcatgtt

SEQ ID NO: 7110 - DNA, 28 bp, Artificial Sequence
  Synthetic
cagtcatttgggtaggtagtttcatgtt

SEQ ID NO: 7111 - DNA, 28 bp, Artificial Sequence
  Synthetic
cagtcatttgggttcaccaccttctcca

SEQ ID NO: 7112 - DNA, 28 bp, Artificial Sequence
  Synthetic
cagtcatttgggggtccagaggggagat

SEQ ID NO: 7113 - DNA, 28 bp, Artificial Sequence
  Synthetic
cagtcatttgggcccagtgttcagacta

SEQ ID NO: 7114 - DNA, 28 bp, Artificial Sequence
  Synthetic
cagtcatttgggtgtgcaaatctatgca

SEQ ID NO: 7115 - DNA, 28 bp, Artificial Sequence
  Synthetic
cagtcatttgggtgtgcaaatccatgca

SEQ ID NO: 7116 - DNA, 28 bp, Artificial Sequence
  Synthetic
cagtcatttgggtaaagtgcttatagtg

SEQ ID NO: 7117 - DNA, 28 bp, Artificial Sequence
  Synthetic
cagtcatttgggaatactgccgggtaat

SEQ ID NO: 7118 - DNA, 28 bp, Artificial Sequence
  Synthetic
cagtcatttgggttccctttgtcatcct

SEQ ID NO: 7119 - DNA, 28 bp, Artificial Sequence
  Synthetic
cagtcatttgggtggaatgtaaggaagt

SEQ ID NO: 7120 - DNA, 28 bp, Artificial Sequence
  Synthetic
cagtcatttgggtagcttatcagactga

SEQ ID NO: 7121 - DNA, 28 bp, Artificial Sequence
  Synthetic
cagtcatttgggttccctttgtcatcct

SEQ ID NO: 7122 - DNA, 28 bp, Artificial Sequence
  Synthetic
cagtcatttgggacagcaggcacagaca

SEQ ID NO: 7123 - DNA, 28 bp, Artificial Sequence
  Synthetic
cagtcatttgggatgacctatgaattga

SEQ ID NO: 7124 - DNA, 28 bp, Artificial Sequence
  Synthetic
cagtcatttgggtaatctcagctggcaa

SEQ ID NO: 7125 - DNA, 28 bp, Artificial Sequence
  Synthetic
cagtcatttgggttgtgcttgatctaac

SEQ ID NO: 7126 - DNA, 28 bp, Artificial Sequence
  Synthetic
cagtcatttgggtgattgtccaaacgca

SEQ ID NO: 7127 - DNA, 28 bp, Artificial Sequence
  Synthetic
cagtcatttgggaagctgccagttgaag

SEQ ID NO: 7128 - DNA, 28 bp, Artificial Sequence
  Synthetic
cagtcatttgggagctacattgtctgct

SEQ ID NO: 7129 - DNA, 28 bp, Artificial Sequence
  Synthetic
cagtcatttgggtgtcagtttgtcaaat

SEQ ID NO: 7130 - DNA, 28 bp, Artificial Sequence
  Synthetic
cagtcatttgggcaagtcactagtggtt

SEQ ID NO: 7131 - DNA, 28 bp, Artificial Sequence
  Synthetic
cagtcatttgggatcacattgccaggga

SEQ ID NO: 7132 - DNA, 28 bp, Artificial Sequence
  Synthetic
cagtcatttgggatcacattgccaggga

SEQ ID NO: 7133 - DNA, 28 bp, Artificial Sequence
  Synthetic
cagtcatttgggtggctcagttcagcag

SEQ ID NO: 7134 - DNA, 28 bp, Artificial Sequence
  Synthetic
cagtcatttgggcattgcacttgtctcg

SEQ ID NO: 7135 - DNA, 28 bp, Artificial Sequence
  Synthetic
cagtcatttgggttcaagtaatccagga

SEQ ID NO: 7136 - DNA, 28 bp, Artificial Sequence
  Synthetic
cagtcatttgggttcacagtggctaagt

SEQ ID NO: 7137 - DNA, 28 bp, Artificial Sequence
  Synthetic
cagtcatttgggaaggagctcacagtct

SEQ ID NO: 7138 - DNA, 28 bp, Artificial Sequence
  Synthetic
cagtcatttgggctagcaccatctgaaa

SEQ ID NO: 7139 - DNA, 28 bp, Artificial Sequence
  Synthetic
cagtcatttgggtagcaccatttgaaat

SEQ ID NO: 7140 - DNA, 28 bp, Artificial Sequence
  Synthetic
cagtcatttgggctttcagtcggatgtt

SEQ ID NO: 7141 - DNA, 28 bp, Artificial Sequence
  Synthetic
cagtcatttgggtgtaaacatcctcgac

SEQ ID NO: 7142 - DNA, 28 bp, Artificial Sequence
  Synthetic
cagtcatttgggggcaagatgctggcat

SEQ ID NO: 7143 - DNA, 28 bp, Artificial Sequence
  Synthetic
cagtcatttgggtattgcacattactaa

SEQ ID NO: 7144 - DNA, 28 bp, Artificial Sequence
  Synthetic
cagtcatttggggtgcattgtagttgca

SEQ ID NO: 7145 - DNA, 28 bp, Artificial Sequence
  Synthetic
cagtcatttgggtggcagtgtcttagct

SEQ ID NO: 7146 - DNA, 28 bp, Artificial Sequence
  Synthetic
cagtcatttgggtggaagactagtgatt

SEQ ID NO: 7147 - DNA, 28 bp, Artificial Sequence
  Synthetic
cagtcatttgggtattgcacttgtcccg

SEQ ID NO: 7148 - DNA, 28 bp, Artificial Sequence
  Synthetic
cagtcatttgggaaagtgctgttcgtgc

SEQ ID NO: 7149 - DNA, 28 bp, Artificial Sequence
  Synthetic
cagtcatttgggttcaacgggtatttat

SEQ ID NO: 7150 - DNA, 28 bp, Artificial Sequence
  Synthetic
cagtcatttgggtgaggtagtaagttgt

SEQ ID NO: 7151 - DNA, 28 bp, Artificial Sequence
  Synthetic
cagtcatttgggaacccgtagatccgat

SEQ ID NO: 7152 - DNA, 28 bp, Artificial Sequence
  Synthetic
cagtcatttgggtgacagaagagagtga

SEQ ID NO: 7153 - DNA, 28 bp, Artificial Sequence
  Synthetic
cagtcatttgggtgacagaagagagtga

SEQ ID NO: 7154 - DNA, 28 bp, Artificial Sequence
  Synthetic
cagtcatttgggtgacagaagagagtga

SEQ ID NO: 7155 - DNA, 28 bp, Artificial Sequence
  Synthetic
cagtcatttgggtgacagaagagagtga

SEQ ID NO: 7156 - DNA, 28 bp, Artificial Sequence
  Synthetic
cagtcatttgggtgacagaagagagtga

SEQ ID NO: 7157 - DNA, 28 bp, Artificial Sequence
  Synthetic
cagtcatttgggtgacagaagagagtga

SEQ ID NO: 7158 - DNA, 28 bp, Artificial Sequence
  Synthetic
cagtcatttgggttgacagaagatagag

SEQ ID NO: 7159 - DNA, 28 bp, Artificial Sequence
  Synthetic
cagtcatttgggttgacagaagatagag

SEQ ID NO: 7160 - DNA, 28 bp, Artificial Sequence
  Synthetic
cagtcatttgggttgacagaagatagag

SEQ ID NO: 7161 - DNA, 28 bp, Artificial Sequence
  Synthetic
cagtcatttgggttgacagaagatagag

SEQ ID NO: 7162 - DNA, 28 bp, Artificial Sequence
  Synthetic
cagtcatttgggtgacagaagagaggga

SEQ ID NO: 7163 - DNA, 28 bp, Artificial Sequence
  Synthetic
cagtcatttgggtttggattgaagggag

SEQ ID NO: 7164 - DNA, 28 bp, Artificial Sequence
  Synthetic
cagtcatttgggtttggattgaagggag

SEQ ID NO: 7165 - DNA, 28 bp, Artificial Sequence
  Synthetic
cagtcatttgggtttggattgaagggag

SEQ ID NO: 7166 - DNA, 28 bp, Artificial Sequence
  Synthetic
cagtcatttgggcttggattgaagggag

SEQ ID NO: 7167 - DNA, 28 bp, Artificial Sequence
  Synthetic
cagtcatttgggcttggggtgaagggag

SEQ ID NO: 7168 - DNA, 28 bp, Artificial Sequence
  Synthetic
cagtcatttgggattggagtgaagggag

SEQ ID NO: 7169 - DNA, 28 bp, Artificial Sequence
  Synthetic
cagtcatttgggtgcctggctccctgta

SEQ ID NO: 7170 - DNA, 28 bp, Artificial Sequence
  Synthetic
cagtcatttgggtgcctggctccctgta

SEQ ID NO: 7171 - DNA, 28 bp, Artificial Sequence
  Synthetic
cagtcatttgggtgcctggctccctgta

SEQ ID NO: 7172 - DNA, 28 bp, Artificial Sequence
  Synthetic
cagtcatttgggtgcctggctccctgta

SEQ ID NO: 7173 - DNA, 28 bp, Artificial Sequence
  Synthetic
cagtcatttgggtgcctggctccctgaa

SEQ ID NO: 7174 - DNA, 28 bp, Artificial Sequence
  Synthetic
cagtcatttgggtgcctggctccctgaa

SEQ ID NO: 7175 - DNA, 28 bp, Artificial Sequence
  Synthetic
cagtcatttgggtgcctggctccctgga

SEQ ID NO: 7176 - DNA, 28 bp, Artificial Sequence
  Synthetic
cagtcatttgggtgcctggctccctgca

SEQ ID NO: 7177 - DNA, 28 bp, Artificial Sequence
  Synthetic
cagtcatttgggtcgataaacctctgca

SEQ ID NO: 7178 - DNA, 28 bp, Artificial Sequence
  Synthetic
cagtcatttgggtcgataaacctctgca

SEQ ID NO: 7179 - DNA, 28 bp, Artificial Sequence
  Synthetic
cagtcatttgggtcgataaacctctgca

SEQ ID NO: 7180 - DNA, 28 bp, Artificial Sequence
  Synthetic
cagtcatttgggtggagaagcagggcac

SEQ ID NO: 7181 - DNA, 28 bp, Artificial Sequence
  Synthetic
cagtcatttgggtggagaagcagggcac

SEQ ID NO: 7182 - DNA, 28 bp, Artificial Sequence
  Synthetic
cagtcatttgggtggagaagcagggcac

SEQ ID NO: 7183 - DNA, 28 bp, Artificial Sequence
  Synthetic
cagtcatttgggtggagaagcagggcac

SEQ ID NO: 7184 - DNA, 28 bp, Artificial Sequence
  Synthetic
cagtcatttgggtggagaagcagggcac

SEQ ID NO: 7185 - DNA, 28 bp, Artificial Sequence
  Synthetic
cagtcatttgggtggagaagcagggcac

SEQ ID NO: 7186 - DNA, 28 bp, Artificial Sequence
  Synthetic
cagtcatttgggtcggaccaggcttcat

SEQ ID NO: 7187 - DNA, 28 bp, Artificial Sequence
  Synthetic
cagtcatttgggtcggaccaggcttcat

SEQ ID NO: 7188 - DNA, 28 bp, Artificial Sequence
  Synthetic
cagtcatttgggtcggaccaggcttcat

SEQ ID NO: 7189 - DNA, 28 bp, Artificial Sequence
  Synthetic
cagtcatttgggtcggaccaggcttcat

SEQ ID NO: 7190 - DNA, 28 bp, Artificial Sequence
  Synthetic
cagtcatttgggtcggaccaggcttcat

SEQ ID NO: 7191 - DNA, 28 bp, Artificial Sequence
  Synthetic
cagtcatttgggtcggaccaggcttcat

SEQ ID NO: 7192 - DNA, 28 bp, Artificial Sequence
  Synthetic
cagtcatttgggtcggaccaggcttcat

SEQ ID NO: 7193 - DNA, 28 bp, Artificial Sequence
  Synthetic
cagtcatttgggtcggaccaggcttcat

SEQ ID NO: 7194 - DNA, 28 bp, Artificial Sequence
  Synthetic
cagtcatttgggtcggaccaggcttcat

SEQ ID NO: 7195 - DNA, 28 bp, Artificial Sequence
  Synthetic
cagtcatttgggtcggaccaggcttcat

SEQ ID NO: 7196 - DNA, 28 bp, Artificial Sequence
  Synthetic
cagtcatttgggtcggaccaggcttcat

SEQ ID NO: 7197 - DNA, 28 bp, Artificial Sequence
  Synthetic
cagtcatttgggtcggaccaggcttcat

SEQ ID NO: 7198 - DNA, 28 bp, Artificial Sequence
  Synthetic
cagtcatttgggtcggaccaggcttcat

SEQ ID NO: 7199 - DNA, 28 bp, Artificial Sequence
  Synthetic
cagtcatttgggtcggaccaggcttcat

SEQ ID NO: 7200 - DNA, 28 bp, Artificial Sequence
  Synthetic
cagtcatttgggtcggaccaggcttcat

SEQ ID NO: 7201 - DNA, 28 bp, Artificial Sequence
  Synthetic
cagtcatttgggtcggaccaggctccat

SEQ ID NO: 7202 - DNA, 28 bp, Artificial Sequence
  Synthetic
cagtcatttgggtcggaccaggcttcat

SEQ ID NO: 7203 - DNA, 28 bp, Artificial Sequence
  Synthetic
cagtcatttgggtgaagctgccagcatg

SEQ ID NO: 7204 - DNA, 28 bp, Artificial Sequence
  Synthetic
cagtcatttgggtgaagctgccagcatg

SEQ ID NO: 7205 - DNA, 28 bp, Artificial Sequence
  Synthetic
cagtcatttgggtgaagctgccagcatg

SEQ ID NO: 7206 - DNA, 28 bp, Artificial Sequence
  Synthetic
cagtcatttgggtgaagctgccagcatg

SEQ ID NO: 7207 - DNA, 28 bp, Artificial Sequence
  Synthetic
cagtcatttgggtgaagctgccagcatg

SEQ ID NO: 7208 - DNA, 28 bp, Artificial Sequence
  Synthetic
cagtcatttgggtgaagctgccagcatg

SEQ ID NO: 7209 - DNA, 28 bp, Artificial Sequence
  Synthetic
cagtcatttgggtgaagctgccagcatg

SEQ ID NO: 7210 - DNA, 28 bp, Artificial Sequence
  Synthetic
cagtcatttgggtgaagctgccaacatg

SEQ ID NO: 7211 - DNA, 28 bp, Artificial Sequence
  Synthetic
cagtcatttgggtcgcttggtgcaggtc

SEQ ID NO: 7212 - DNA, 28 bp, Artificial Sequence
  Synthetic
cagtcatttgggtcgcttggtgcaggtc

SEQ ID NO: 7213 - DNA, 28 bp, Artificial Sequence
  Synthetic
cagtcatttgggcagccaaggatgactt

SEQ ID NO: 7214 - DNA, 28 bp, Artificial Sequence
  Synthetic
cagtcatttggggagccaagaatgactt

SEQ ID NO: 7215 - DNA, 28 bp, Artificial Sequence
  Synthetic
cagtcatttgggtagccaaggacgactt

SEQ ID NO: 7216 - DNA, 28 bp, Artificial Sequence
  Synthetic
cagtcatttgggtagccaaggacgactt

SEQ ID NO: 7217 - DNA, 28 bp, Artificial Sequence
  Synthetic
cagtcatttgggtagccaaggacgactt

SEQ ID NO: 7218 - DNA, 28 bp, Artificial Sequence
  Synthetic
cagtcatttgggtagccaaggacgactt

SEQ ID NO: 7219 - DNA, 28 bp, Artificial Sequence
  Synthetic
cagtcatttgggtagccaaggacgactt

SEQ ID NO: 7220 - DNA, 28 bp, Artificial Sequence
  Synthetic
cagtcatttgggcagccaaggatgactt

SEQ ID NO: 7221 - DNA, 28 bp, Artificial Sequence
  Synthetic
cagtcatttgggcagccaaggatgactt

SEQ ID NO: 7222 - DNA, 28 bp, Artificial Sequence
  Synthetic
cagtcatttgggcagccaaggatgactt

SEQ ID NO: 7223 - DNA, 28 bp, Artificial Sequence
  Synthetic
cagtcatttgggcagccaaggatgactt

SEQ ID NO: 7224 - DNA, 28 bp, Artificial Sequence
  Synthetic
cagtcatttgggcagccaaggatgactt

SEQ ID NO: 7225 - DNA, 28 bp, Artificial Sequence
  Synthetic
cagtcatttgggcagccaaggatgactt

SEQ ID NO: 7226 - DNA, 28 bp, Artificial Sequence
  Synthetic
cagtcatttgggcagccaaggatgactt

SEQ ID NO: 7227 - DNA, 28 bp, Artificial Sequence
  Synthetic
cagtcatttgggtagccaaggatgactt

SEQ ID NO: 7228 - DNA, 28 bp, Artificial Sequence
  Synthetic
cagtcatttgggtagccaaggatgactt

SEQ ID NO: 7229 - DNA, 28 bp, Artificial Sequence
  Synthetic
cagtcatttgggtagccaaggatgactt

SEQ ID NO: 7230 - DNA, 28 bp, Artificial Sequence
  Synthetic
cagtcatttgggtagccaaggatgactt

SEQ ID NO: 7231 - DNA, 28 bp, Artificial Sequence
  Synthetic
cagtcatttgggtagccaaggatgactt

SEQ ID NO: 7232 - DNA, 28 bp, Artificial Sequence
  Synthetic
cagtcatttgggtgagccaaggatgact

SEQ ID NO: 7233 - DNA, 28 bp, Artificial Sequence
  Synthetic
cagtcatttgggaagccaaggatgactt

SEQ ID NO: 7234 - DNA, 28 bp, Artificial Sequence
  Synthetic
cagtcatttgggaagccaaggatgactt

SEQ ID NO: 7235 - DNA, 28 bp, Artificial Sequence
  Synthetic
cagtcatttgggtagccaaggacgactt

SEQ ID NO: 7236 - DNA, 28 bp, Artificial Sequence
  Synthetic
cagtcatttgggtagccaaggatgactt

SEQ ID NO: 7237 - DNA, 28 bp, Artificial Sequence
  Synthetic
cagtcatttgggtcagccaaggatgact

SEQ ID NO: 7238 - DNA, 28 bp, Artificial Sequence
  Synthetic
cagtcatttggggagccaagaatgactt

SEQ ID NO: 7239 - DNA, 28 bp, Artificial Sequence
  Synthetic
cagtcatttgggtagccaaggacgactt

SEQ ID NO: 7240 - DNA, 28 bp, Artificial Sequence
  Synthetic
cagtcatttgggtagccaaggatgactt

SEQ ID NO: 7241 - DNA, 28 bp, Artificial Sequence
  Synthetic
cagtcatttgggtagccaaggatgactt

SEQ ID NO: 7242 - DNA, 28 bp, Artificial Sequence
  Synthetic
cagtcatttgggtagccaaggatgactt

SEQ ID NO: 7243 - DNA, 28 bp, Artificial Sequence
  Synthetic
cagtcatttgggtagccatggatgaatt

SEQ ID NO: 7244 - DNA, 28 bp, Artificial Sequence
  Synthetic
cagtcatttgggcagccaagaatgattt

SEQ ID NO: 7245 - DNA, 28 bp, Artificial Sequence
  Synthetic
cagtcatttgggttgagccgtgccaata

SEQ ID NO: 7246 - DNA, 28 bp, Artificial Sequence
  Synthetic
cagtcatttgggttgagccgtgccaata

SEQ ID NO: 7247 - DNA, 28 bp, Artificial Sequence
  Synthetic
cagtcatttgggagattgagccgcgcca

SEQ ID NO: 7248 - DNA, 28 bp, Artificial Sequence
  Synthetic
cagtcatttgggagattgagccgcgcca

SEQ ID NO: 7249 - DNA, 28 bp, Artificial Sequence
  Synthetic
cagtcatttgggtgattgagccgtgcca

SEQ ID NO: 7250 - DNA, 28 bp, Artificial Sequence
  Synthetic
cagtcatttgggtgattgagccgtgcca

SEQ ID NO: 7251 - DNA, 28 bp, Artificial Sequence
  Synthetic
cagtcatttgggtgattgagccgtgcca

SEQ ID NO: 7252 - DNA, 28 bp, Artificial Sequence
  Synthetic
cagtcatttgggtgattgagccgtgcca

SEQ ID NO: 7253 - DNA, 28 bp, Artificial Sequence
  Synthetic
cagtcatttgggtgattgagccgtgcca

SEQ ID NO: 7254 - DNA, 28 bp, Artificial Sequence
  Synthetic
cagtcatttgggggattgagccgcgcca

SEQ ID NO: 7255 - DNA, 28 bp, Artificial Sequence
  Synthetic
cagtcatttgggggattgagccgcgcca

SEQ ID NO: 7256 - DNA, 28 bp, Artificial Sequence
  Synthetic
cagtcatttgggagaatcttgatgatgc

SEQ ID NO: 7257 - DNA, 28 bp, Artificial Sequence
  Synthetic
cagtcatttgggagaatcttgatgatgc

SEQ ID NO: 7258 - DNA, 28 bp, Artificial Sequence
  Synthetic
cagtcatttgggagaatcttgatgatgc

SEQ ID NO: 7259 - DNA, 28 bp, Artificial Sequence
  Synthetic
cagtcatttgggggaatcttgatgatgc

SEQ ID NO: 7260 - DNA, 28 bp, Artificial Sequence
  Synthetic
cagtcatttgggggaatcttgatgatgc

SEQ ID NO: 7261 - DNA, 28 bp, Artificial Sequence
  Synthetic
cagtcatttgggagaatcttgatgatgc

SEQ ID NO: 7262 - DNA, 28 bp, Artificial Sequence
  Synthetic
cagtcatttgggggaatcttgatgatgc

SEQ ID NO: 7263 - DNA, 28 bp, Artificial Sequence
  Synthetic
cagtcatttgggggaatcttgatgatgc

SEQ ID NO: 7264 - DNA, 28 bp, Artificial Sequence
  Synthetic
cagtcatttgggagaatcctgatgatgc

SEQ ID NO: 7265 - DNA, 28 bp, Artificial Sequence
  Synthetic
cagtcatttgggttggactgaagggagc

SEQ ID NO: 7266 - DNA, 28 bp, Artificial Sequence
  Synthetic
cagtcatttgggttggactgaagggagc

SEQ ID NO: 7267 - DNA, 28 bp, Artificial Sequence
  Synthetic
cagtcatttgggttggactgaagggagc

SEQ ID NO: 7268 - DNA, 28 bp, Artificial Sequence
  Synthetic
cagtcatttgggttggactgaagggagc

SEQ ID NO: 7269 - DNA, 28 bp, Artificial Sequence
  Synthetic
cagtcatttgggttggactgaagggagc

SEQ ID NO: 7270 - DNA, 28 bp, Artificial Sequence
  Synthetic
cagtcatttgggttggactgaagggagc

SEQ ID NO: 7271 - DNA, 28 bp, Artificial Sequence
  Synthetic
cagtcatttgggttggactgaagggagc

SEQ ID NO: 7272 - DNA, 28 bp, Artificial Sequence
  Synthetic
cagtcatttgggttggactgaagggagc

SEQ ID NO: 7273 - DNA, 28 bp, Artificial Sequence
  Synthetic
cagtcatttgggttgggctgaagggagc

SEQ ID NO: 7274 - DNA, 28 bp, Artificial Sequence
  Synthetic
cagtcatttgggaagctcaggagggata

SEQ ID NO: 7275 - DNA, 28 bp, Artificial Sequence
  Synthetic
cagtcatttgggaagctcaggagggata

SEQ ID NO: 7276 - DNA, 28 bp, Artificial Sequence
  Synthetic
cagtcatttgggaagctcaggagggata

SEQ ID NO: 7277 - DNA, 28 bp, Artificial Sequence
  Synthetic
cagtcatttgggaagctcaggagggata

SEQ ID NO: 7278 - DNA, 28 bp, Artificial Sequence
  Synthetic
cagtcatttgggtccaaagggatcgcat

SEQ ID NO: 7279 - DNA, 28 bp, Artificial Sequence
  Synthetic
cagtcatttgggtccaaagggatcgcat

SEQ ID NO: 7280 - DNA, 28 bp, Artificial Sequence
  Synthetic
cagtcatttgggtccaaagggatcgcat

SEQ ID NO: 7281 - DNA, 28 bp, Artificial Sequence
  Synthetic
cagtcatttgggtccaaagggatcgcat

SEQ ID NO: 7282 - DNA, 28 bp, Artificial Sequence
  Synthetic
cagtcatttgggttggcattctgtccac

SEQ ID NO: 7283 - DNA, 28 bp, Artificial Sequence
  Synthetic
cagtcatttgggttggcattctgtccac

SEQ ID NO: 7284 - DNA, 28 bp, Artificial Sequence
  Synthetic
cagtcatttgggctgaagggtttggagg

SEQ ID NO: 7285 - DNA, 28 bp, Artificial Sequence
  Synthetic
cagtcatttgggctgaagtgtttggggg

SEQ ID NO: 7286 - DNA, 28 bp, Artificial Sequence
  Synthetic
cagtcatttgggctgaagtgtttggggg

SEQ ID NO: 7287 - DNA, 28 bp, Artificial Sequence
  Synthetic
cagtcatttgggctgaagtgtttggggg

SEQ ID NO: 7288 - DNA, 28 bp, Artificial Sequence
  Synthetic
cagtcatttgggctgaagtgtttggggg

SEQ ID NO: 7289 - DNA, 28 bp, Artificial Sequence
  Synthetic
cagtcatttgggctgaagtgtttggggg

SEQ ID NO: 7290 - DNA, 28 bp, Artificial Sequence
  Synthetic
cagtcatttgggctgaagtgtttggggg

SEQ ID NO: 7291 - DNA, 28 bp, Artificial Sequence
  Synthetic
cagtcatttgggctgaagtgtttggggg

SEQ ID NO: 7292 - DNA, 28 bp, Artificial Sequence
  Synthetic
cagtcatttgggctgaagtgtttggggg

SEQ ID NO: 7293 - DNA, 28 bp, Artificial Sequence
  Synthetic
cagtcatttgggctgaagtgtttggggg

SEQ ID NO: 7294 - DNA, 28 bp, Artificial Sequence
  Synthetic
cagtcatttgggttccacagctttcttg

SEQ ID NO: 7295 - DNA, 28 bp, Artificial Sequence
  Synthetic
cagtcatttgggttccacagctttcttg

SEQ ID NO: 7296 - DNA, 28 bp, Artificial Sequence
  Synthetic
cagtcatttgggttccacagctttcttg

SEQ ID NO: 7297 - DNA, 28 bp, Artificial Sequence
  Synthetic
cagtcatttgggttccacagctttcttg

SEQ ID NO: 7298 - DNA, 28 bp, Artificial Sequence
  Synthetic
cagtcatttgggttccacagctttcttg

SEQ ID NO: 7299 - DNA, 28 bp, Artificial Sequence
  Synthetic
cagtcatttgggttccacggctttcttg

SEQ ID NO: 7300 - DNA, 28 bp, Artificial Sequence
  Synthetic
cagtcatttgggttccacggctttcttg

SEQ ID NO: 7301 - DNA, 28 bp, Artificial Sequence
  Synthetic
cagtcatttgggtcattgagtgcagcgt

SEQ ID NO: 7302 - DNA, 28 bp, Artificial Sequence
  Synthetic
cagtcatttgggccattgagtgcagcgt

SEQ ID NO: 7303 - DNA, 28 bp, Artificial Sequence
  Synthetic
cagtcatttgggtcattgagtggagctt

SEQ ID NO: 7304 - DNA, 28 bp, Artificial Sequence
  Synthetic
cagtcatttgggtgtgttctcaggtcac

SEQ ID NO: 7305 - DNA, 28 bp, Artificial Sequence
  Synthetic
cagtcatttgggtgtgttctcaggtcgc

SEQ ID NO: 7306 - DNA, 28 bp, Artificial Sequence
  Synthetic
cagtcatttgggtgtgttctcaggtcgc

SEQ ID NO: 7307 - DNA, 28 bp, Artificial Sequence
  Synthetic
cagtcatttgggtgccaaaggagatttg

SEQ ID NO: 7308 - DNA, 28 bp, Artificial Sequence
  Synthetic
cagtcatttgggtgccaaaggagatttg

SEQ ID NO: 7309 - DNA, 28 bp, Artificial Sequence
  Synthetic
cagtcatttgggtgccaaaggagatttg

SEQ ID NO: 7310 - DNA, 28 bp, Artificial Sequence
  Synthetic
cagtcatttgggtgccaaagaagatttg

SEQ ID NO: 7311 - DNA, 28 bp, Artificial Sequence
  Synthetic
cagtcatttgggtgccaaagaagatttg

SEQ ID NO: 7312 - DNA, 28 bp, Artificial Sequence
  Synthetic
cagtcatttgggtgccaaaggagaattg

SEQ ID NO: 7313 - DNA, 28 bp, Artificial Sequence
  Synthetic
cagtcatttgggtgccaaaggagaattg

SEQ ID NO: 7314 - DNA, 28 bp, Artificial Sequence
  Synthetic
cagtcatttgggtgccaaaggagagttt

SEQ ID NO: 7315 - DNA, 28 bp, Artificial Sequence
  Synthetic
cagtcatttgggtgccaaaggagagttg

SEQ ID NO: 7316 - DNA, 28 bp, Artificial Sequence
  Synthetic
cagtcatttgggtgccaaaggagatttg

SEQ ID NO: 7317 - DNA, 28 bp, Artificial Sequence
  Synthetic
cagtcatttgggtgccaaaggagatttg

SEQ ID NO: 7318 - DNA, 28 bp, Artificial Sequence
  Synthetic
cagtcatttgggcgccaaaggagagttg

SEQ ID NO: 7319 - DNA, 28 bp, Artificial Sequence
  Synthetic
cagtcatttgggttagattcacgcacaa

SEQ ID NO: 7320 - DNA, 28 bp, Artificial Sequence
  Synthetic
cagtcatttgggttagattcacgcacaa

SEQ ID NO: 7321 - DNA, 28 bp, Artificial Sequence
  Synthetic
cagtcatttgggttagattcacgcacaa

SEQ ID NO: 7322 - DNA, 28 bp, Artificial Sequence
  Synthetic
cagtcatttgggatgcactgcctcttcc

SEQ ID NO: 7323 - DNA, 28 bp, Artificial Sequence
  Synthetic
cagtcatttgggttttccctactccacc

SEQ ID NO: 7324 - DNA, 28 bp, Artificial Sequence
  Synthetic
cagtcatttgggttttcccaactccacc

SEQ ID NO: 7325 - DNA, 28 bp, Artificial Sequence
  Synthetic
cagtcatttgggactctccctcaaggct

SEQ ID NO: 7326 - DNA, 28 bp, Artificial Sequence
  Synthetic
cagtcatttggggctctccctcagggct

SEQ ID NO: 7327 - DNA, 28 bp, Artificial Sequence
  Synthetic
cagtcatttgggcaaaagttgctgggtt

SEQ ID NO: 7328 - DNA, 28 bp, Artificial Sequence
  Synthetic
cagtcatttgggcaaaagttgttgggtt

SEQ ID NO: 7329 - DNA, 28 bp, Artificial Sequence
  Synthetic
cagtcatttgggcaaaagctgttgggtt

SEQ ID NO: 7330 - DNA, 28 bp, Artificial Sequence
  Synthetic
cagtcatttgggttacagtgcccattga

SEQ ID NO: 7331 - DNA, 28 bp, Artificial Sequence
  Synthetic
cagtcatttgggttacagtgcccattga

SEQ ID NO: 7332 - DNA, 28 bp, Artificial Sequence
  Synthetic
cagtcatttgggttacaatgtccattga

SEQ ID NO: 7333 - DNA, 28 bp, Artificial Sequence
  Synthetic
cagtcatttgggttacagagtccattga

SEQ ID NO: 7334 - DNA, 28 bp, Artificial Sequence
  Synthetic
cagtcatttgggtagtaatccttctttg

SEQ ID NO: 7335 - DNA, 28 bp, Artificial Sequence
  Synthetic
cagtcatttgggtagtaattcttctttg

SEQ ID NO: 7336 - DNA, 28 bp, Artificial Sequence
  Synthetic
cagtcatttgggtagtaattcttctttg

SEQ ID NO: 7337 - DNA, 28 bp, Artificial Sequence
  Synthetic
cagtcatttgggatctccctcagaggct

SEQ ID NO: 7338 - DNA, 28 bp, Artificial Sequence
  Synthetic
cagtcatttgggatctccctcagaggct

SEQ ID NO: 7339 - DNA, 28 bp, Artificial Sequence
  Synthetic
cagtcatttgggtgacgtgtcttctatt

SEQ ID NO: 7340 - DNA, 28 bp, Artificial Sequence
  Synthetic
cagtcatttgggtgacgtgtcttctatt

SEQ ID NO: 7341 - DNA, 28 bp, Artificial Sequence
  Synthetic
cagtcatttgggtgacgtgtcttctatt

SEQ ID NO: 7342 - DNA, 28 bp, Artificial Sequence
  Synthetic
cagtcatttgggtgacgtgtcttctatt

SEQ ID NO: 7343 - DNA, 28 bp, Artificial Sequence
  Synthetic
cagtcatttgggtgacgagtcttctatt

SEQ ID NO: 7344 - DNA, 28 bp, Artificial Sequence
  Synthetic
cagtcatttgggtgacatgtcttctatt

SEQ ID NO: 7345 - DNA, 28 bp, Artificial Sequence
  Synthetic
cagtcatttgggtaacgtgtctcctatt

SEQ ID NO: 7346 - DNA, 28 bp, Artificial Sequence
  Synthetic
cagtcatttgggtaacgtgtctcctatt

SEQ ID NO: 7347 - DNA, 28 bp, Artificial Sequence
  Synthetic
cagtcatttgggtaacgtgtctcctatt

SEQ ID NO: 7348 - DNA, 28 bp, Artificial Sequence
  Synthetic
cagtcatttgggtaacgtgtctcctatt

SEQ ID NO: 7349 - DNA, 28 bp, Artificial Sequence
  Synthetic
cagtcatttgggtaacgtgtctcctatt

SEQ ID NO: 7350 - DNA, 28 bp, Artificial Sequence
  Synthetic
cagtcatttgggtaacgtgtctcctatt

SEQ ID NO: 7351 - DNA, 28 bp, Artificial Sequence
  Synthetic
cagtcatttgggtaacgtgtctcctatt

SEQ ID NO: 7352 - DNA, 28 bp, Artificial Sequence
  Synthetic
cagtcatttgggtaacgtgtctcctatt

SEQ ID NO: 7353 - DNA, 28 bp, Artificial Sequence
  Synthetic
cagtcatttgggtaacgtgtctcctatt

SEQ ID NO: 7354 - DNA, 28 bp, Artificial Sequence
  Synthetic
cagtcatttgggtaacgtgtctcctatt

SEQ ID NO: 7355 - DNA, 28 bp, Artificial Sequence
  Synthetic
cagtcatttgggtaacgtgtctcctatt

SEQ ID NO: 7356 - DNA, 28 bp, Artificial Sequence
  Synthetic
cagtcatttgggtaacgtgtctcctatt

SEQ ID NO: 7357 - DNA, 28 bp, Artificial Sequence
  Synthetic
cagtcatttgggtaacgtgtctcctatt

SEQ ID NO: 7358 - DNA, 28 bp, Artificial Sequence
  Synthetic
cagtcatttgggtgtgatattggtccgg

SEQ ID NO: 7359 - DNA, 28 bp, Artificial Sequence
  Synthetic
cagtcatttgggactactacatcattga

SEQ ID NO: 7360 - DNA, 28 bp, Artificial Sequence
  Synthetic
cagtcatttgggactactacatcattga

SEQ ID NO: 7361 - DNA, 28 bp, Artificial Sequence
  Synthetic
cagtcatttgggaggacctcacttaaca

SEQ ID NO: 7362 - DNA, 28 bp, Artificial Sequence
  Synthetic
cagtcatttgggaggacctcacttaaca

SEQ ID NO: 7363 - DNA, 28 bp, Artificial Sequence
  Synthetic
cagtcatttgggaggacctcacttaaca

SEQ ID NO: 7364 - DNA, 28 bp, Artificial Sequence
  Synthetic
cagtcatttgggaagacctcacctaaca

SEQ ID NO: 7365 - DNA, 28 bp, Artificial Sequence
  Synthetic
cagtcatttgggaggacctcacctaaca

SEQ ID NO: 7366 - DNA, 28 bp, Artificial Sequence
  Synthetic
cagtcatttgggcctactcctcccattc

SEQ ID NO: 7367 - DNA, 28 bp, Artificial Sequence
  Synthetic
cagtcatttgggaacccgtagatccgaa

SEQ ID NO: 7368 - DNA, 28 bp, Artificial Sequence
  Synthetic
cagtcatttgggtacagtactgtgataa

SEQ ID NO: 7369 - DNA, 28 bp, Artificial Sequence
  Synthetic
cagtcatttgggagcagcattgtacagg

SEQ ID NO: 7370 - DNA, 28 bp, Artificial Sequence
  Synthetic
cagtcatttgggtcaaatgctcagactc

SEQ ID NO: 7371 - DNA, 28 bp, Artificial Sequence
  Synthetic
cagtcatttgggaaaagtgcttacagtg

SEQ ID NO: 7372 - DNA, 28 bp, Artificial Sequence
  Synthetic
cagtcatttgggtaaagtgctgacagtg

SEQ ID NO: 7373 - DNA, 28 bp, Artificial Sequence
  Synthetic
cagtcatttgggagcagcattgtacagg

SEQ ID NO: 7374 - DNA, 28 bp, Artificial Sequence
  Synthetic
cagtcatttgggttaaggcacgcggtga

SEQ ID NO: 7375 - DNA, 28 bp, Artificial Sequence
  Synthetic
cagtcatttgggtccctgagaccctaac

SEQ ID NO: 7376 - DNA, 28 bp, Artificial Sequence
  Synthetic
cagtcatttgggtcggatccgtctgagc

SEQ ID NO: 7377 - DNA, 28 bp, Artificial Sequence
  Synthetic
cagtcatttgggtcacagtgaaccggtc

SEQ ID NO: 7378 - DNA, 28 bp, Artificial Sequence
  Synthetic
cagtcatttgggttggtccccttcaacc

SEQ ID NO: 7379 - DNA, 28 bp, Artificial Sequence
  Synthetic
cagtcatttgggtatggctttttattcc

SEQ ID NO: 7380 - DNA, 28 bp, Artificial Sequence
  Synthetic
cagtcatttgggactccatttgttttga

SEQ ID NO: 7381 - DNA, 28 bp, Artificial Sequence
  Synthetic
cagtcatttgggagtggttttaccctat

SEQ ID NO: 7382 - DNA, 28 bp, Artificial Sequence
  Synthetic
cagtcatttgggtgagatgaagcactgt

SEQ ID NO: 7383 - DNA, 28 bp, Artificial Sequence
  Synthetic
cagtcatttgggtacagtatagatgatg

SEQ ID NO: 7384 - DNA, 28 bp, Artificial Sequence
  Synthetic
cagtcatttggggtccagttttcccagg

SEQ ID NO: 7385 - DNA, 28 bp, Artificial Sequence
  Synthetic
cagtcatttggggtgtgtggaaatgctt

SEQ ID NO: 7386 - DNA, 28 bp, Artificial Sequence
  Synthetic
cagtcatttgggtaggttatccgtgttg

SEQ ID NO: 7387 - DNA, 28 bp, Artificial Sequence
  Synthetic
cagtcatttgggtagcagcacataatgg

SEQ ID NO: 7388 - DNA, 28 bp, Artificial Sequence
  Synthetic
cagtcatttgggtagcagcacatcatgg

SEQ ID NO: 7389 - DNA, 28 bp, Artificial Sequence
  Synthetic
cagtcatttgggtagcagcacgtaaata

SEQ ID NO: 7390 - DNA, 28 bp, Artificial Sequence
  Synthetic
cagtcatttgggactgcagtgaaggcac

SEQ ID NO: 7391 - DNA, 28 bp, Artificial Sequence
  Synthetic
cagtcatttgggcaaagtgcttacagtg

SEQ ID NO: 7392 - DNA, 28 bp, Artificial Sequence
  Synthetic
cagtcatttgggtaaggtgcatctagtg

SEQ ID NO: 7393 - DNA, 28 bp, Artificial Sequence
  Synthetic
cagtcatttgggaacattcaacgctgtc

SEQ ID NO: 7394 - DNA, 28 bp, Artificial Sequence
  Synthetic
cagtcatttgggaccatcgaccgttgat

SEQ ID NO: 7395 - DNA, 28 bp, Artificial Sequence
  Synthetic
cagtcatttgggaacattcattgctgtc

SEQ ID NO: 7396 - DNA, 28 bp, Artificial Sequence
  Synthetic
cagtcatttgggaacattcaacctgtcg

SEQ ID NO: 7397 - DNA, 28 bp, Artificial Sequence
  Synthetic
cagtcatttgggtatggcactggtagaa

SEQ ID NO: 7398 - DNA, 28 bp, Artificial Sequence
  Synthetic
cagtcatttgggtggacggagaactgat

SEQ ID NO: 7399 - DNA, 28 bp, Artificial Sequence
  Synthetic
cagtcatttgggcaaagaattctccttt

SEQ ID NO: 7400 - DNA, 28 bp, Artificial Sequence
  Synthetic
cagtcatttgggcatcccttgcatggtg

SEQ ID NO: 7401 - DNA, 28 bp, Artificial Sequence
  Synthetic
cagtcatttgggtgatatgtttgatata

SEQ ID NO: 7402 - DNA, 28 bp, Artificial Sequence
  Synthetic
cagtcatttgggtgtaacagcaactcca

SEQ ID NO: 7403 - DNA, 28 bp, Artificial Sequence
  Synthetic
cagtcatttgggtaggtagtttcatgtt

SEQ ID NO: 7404 - DNA, 28 bp, Artificial Sequence
  Synthetic
cagtcatttgggttcaccaccttctcca

SEQ ID NO: 7405 - DNA, 28 bp, Artificial Sequence
  Synthetic
cagtcatttgggggtccagaggggagat

SEQ ID NO: 7406 - DNA, 28 bp, Artificial Sequence
  Synthetic
cagtcatttgggcccagtgttcagacta

SEQ ID NO: 7407 - DNA, 28 bp, Artificial Sequence
  Synthetic
cagtcatttgggtgtgcaaatctatgca

SEQ ID NO: 7408 - DNA, 28 bp, Artificial Sequence
  Synthetic
cagtcatttgggtgtgcaaatccatgca

SEQ ID NO: 7409 - DNA, 28 bp, Artificial Sequence
  Synthetic
cagtcatttgggtaaagtgcttatagtg

SEQ ID NO: 7410 - DNA, 28 bp, Artificial Sequence
  Synthetic
cagtcatttgggttccctttgtcatcct

SEQ ID NO: 7411 - DNA, 28 bp, Artificial Sequence
  Synthetic
cagtcatttgggtccttcattccaccgg

SEQ ID NO: 7412 - DNA, 28 bp, Artificial Sequence
  Synthetic
cagtcatttgggtagcttatcagactga

SEQ ID NO: 7413 - DNA, 28 bp, Artificial Sequence
  Synthetic
cagtcatttgggacagcaggcacagaca

SEQ ID NO: 7414 - DNA, 28 bp, Artificial Sequence
  Synthetic
cagtcatttgggatgacctatgaattga

SEQ ID NO: 7415 - DNA, 28 bp, Artificial Sequence
  Synthetic
cagtcatttgggtaatctcagctggcaa

SEQ ID NO: 7416 - DNA, 28 bp, Artificial Sequence
  Synthetic
cagtcatttgggttgtgcttgatctaac

SEQ ID NO: 7417 - DNA, 28 bp, Artificial Sequence
  Synthetic
cagtcatttgggaagctgccagttgaag

SEQ ID NO: 7418 - DNA, 28 bp, Artificial Sequence
  Synthetic
cagtcatttgggccacaccgtatctgac

SEQ ID NO: 7419 - DNA, 28 bp, Artificial Sequence
  Synthetic
cagtcatttgggtgtcagtttgtcaaat

SEQ ID NO: 7420 - DNA, 28 bp, Artificial Sequence
  Synthetic
cagtcatttgggcaagtcactagtggtt

SEQ ID NO: 7421 - DNA, 28 bp, Artificial Sequence
  Synthetic
cagtcatttgggatcacattgccaggga

SEQ ID NO: 7422 - DNA, 28 bp, Artificial Sequence
  Synthetic
cagtcatttgggatcacattgccaggga

SEQ ID NO: 7423 - DNA, 28 bp, Artificial Sequence
  Synthetic
cagtcatttgggtggctcagttcagcag

SEQ ID NO: 7424 - DNA, 28 bp, Artificial Sequence
  Synthetic
cagtcatttgggcattgcacttgtctcg

SEQ ID NO: 7425 - DNA, 28 bp, Artificial Sequence
  Synthetic
cagtcatttgggttcaagtaatccagga

SEQ ID NO: 7426 - DNA, 28 bp, Artificial Sequence
  Synthetic
cagtcatttgggttcacagtggctaagt

SEQ ID NO: 7427 - DNA, 28 bp, Artificial Sequence
  Synthetic
cagtcatttgggaaggagctcacagtct

SEQ ID NO: 7428 - DNA, 28 bp, Artificial Sequence
  Synthetic
cagtcatttgggctagcaccatctgaaa

SEQ ID NO: 7429 - DNA, 28 bp, Artificial Sequence
  Synthetic
cagtcatttgggtagcaccatttgaaat

SEQ ID NO: 7430 - DNA, 28 bp, Artificial Sequence
  Synthetic
cagtcatttgggctttcagtcggatgtt

SEQ ID NO: 7431 - DNA, 28 bp, Artificial Sequence
  Synthetic
cagtcatttgggtgtaaacatcctcgac

SEQ ID NO: 7432 - DNA, 28 bp, Artificial Sequence
  Synthetic
cagtcatttgggtgtaaacatcctacac

SEQ ID NO: 7433 - DNA, 28 bp, Artificial Sequence
  Synthetic
cagtcatttgggtgtaaacatcctacac

SEQ ID NO: 7434 - DNA, 28 bp, Artificial Sequence
  Synthetic
cagtcatttgggtgtaaacatccccgac

SEQ ID NO: 7435 - DNA, 28 bp, Artificial Sequence
  Synthetic
cagtcatttgggggcaagatgctggcat

SEQ ID NO: 7436 - DNA, 28 bp, Artificial Sequence
  Synthetic
cagtcatttgggtattgcacattactaa

SEQ ID NO: 7437 - DNA, 28 bp, Artificial Sequence
  Synthetic
cagtcatttggggtgcattgtagttgca

SEQ ID NO: 7438 - DNA, 28 bp, Artificial Sequence
  Synthetic
cagtcatttgggtggcagtgtcttagct

SEQ ID NO: 7439 - DNA, 28 bp, Artificial Sequence
  Synthetic
cagtcatttgggtggaagactagtgatt

SEQ ID NO: 7440 - DNA, 28 bp, Artificial Sequence
  Synthetic
cagtcatttgggtctttggttatctagc

SEQ ID NO: 7441 - DNA, 28 bp, Artificial Sequence
  Synthetic
cagtcatttgggtattgcacttgtcccg

SEQ ID NO: 7442 - DNA, 28 bp, Artificial Sequence
  Synthetic
cagtcatttgggaaagtgctgttcgtgc

SEQ ID NO: 7443 - DNA, 28 bp, Artificial Sequence
  Synthetic
cagtcatttgggttcaacgggtatttat

SEQ ID NO: 7444 - DNA, 28 bp, Artificial Sequence
  Synthetic
cagtcatttgggtttggcactagcacat

SEQ ID NO: 7445 - DNA, 28 bp, Artificial Sequence
  Synthetic
cagtcatttgggtgaggtagtaagttgt

SEQ ID NO: 7446 - DNA, 28 bp, Artificial Sequence
  Synthetic
cagtcatttgggaacccgtagatccgat

SEQ ID NO: 7447 - DNA, 28 bp, Artificial Sequence
  Synthetic
cagtcatttgggtaacctgatcagcccc

SEQ ID NO: 7448 - DNA, 28 bp, Artificial Sequence
  Synthetic
cagtcatttgggtagtgcgccggtgacc

SEQ ID NO: 7449 - DNA, 28 bp, Artificial Sequence
  Synthetic
cagtcatttgggtgacactcgataggat

SEQ ID NO: 7450 - DNA, 28 bp, Artificial Sequence
  Synthetic
cagtcatttgggaacggtgcatggactg

SEQ ID NO: 7451 - DNA, 28 bp, Artificial Sequence
  Synthetic
cagtcatttgggagaccagaccatgcac

SEQ ID NO: 7452 - DNA, 28 bp, Artificial Sequence
  Synthetic
cagtcatttggggatcatagccagtgtc

SEQ ID NO: 7453 - DNA, 28 bp, Artificial Sequence
  Synthetic
cagtcatttgggtcgcacatcaggctga

SEQ ID NO: 7454 - DNA, 28 bp, Artificial Sequence
  Synthetic
cagtcatttgggtcggacggtctggtgc

SEQ ID NO: 7455 - DNA, 28 bp, Artificial Sequence
  Synthetic
cagtcatttgggtcctgtagagtatggg

SEQ ID NO: 7456 - DNA, 28 bp, Artificial Sequence
  Synthetic
cagtcatttgggcatgaaacacatggcc

SEQ ID NO: 7457 - DNA, 28 bp, Artificial Sequence
  Synthetic
cagtcatttgggagcaggcatgtcttca

SEQ ID NO: 7458 - DNA, 28 bp, Artificial Sequence
  Synthetic
cagtcatttgggtatcttttgcggggga

SEQ ID NO: 7459 - DNA, 28 bp, Artificial Sequence
  Synthetic
cagtcatttgggcgcacctcgccgtctc

SEQ ID NO: 7460 - DNA, 28 bp, Artificial Sequence
  Synthetic
cagtcatttgggcaccacacgatccact

SEQ ID NO: 7461 - DNA, 28 bp, Artificial Sequence
  Synthetic
cagtcatttgggacctagtaattgtgcg

SEQ ID NO: 7462 - DNA, 28 bp, Artificial Sequence
  Synthetic
cagtcatttgggcgcaccacttttcact

SEQ ID NO: 7463 - DNA, 28 bp, Artificial Sequence
  Synthetic
cagtcatttgggaacctagtgccggtga

SEQ ID NO: 7464 - DNA, 28 bp, Artificial Sequence
  Synthetic
cagtcatttgggtagcaccgctatccac

SEQ ID NO: 7465 - DNA, 28 bp, Artificial Sequence
  Synthetic
cagtcatttgggtttagtggaagtgacg

SEQ ID NO: 7466 - DNA, 28 bp, Artificial Sequence
  Synthetic
cagtcatttgggcgaggtaaacatcggc

SEQ ID NO: 7467 - DNA, 28 bp, Artificial Sequence
  Synthetic
cagtcatttgggtaaggtgaatatagct

SEQ ID NO: 7468 - DNA, 28 bp, Artificial Sequence
  Synthetic
cagtcatttgggtcgatgcatggtcccc

SEQ ID NO: 7469 - DNA, 28 bp, Artificial Sequence
  Synthetic
cagtcatttgggtgaggtagtaggttgt

SEQ ID NO: 7470 - DNA, 28 bp, Artificial Sequence
  Synthetic
cagtcatttgggtgaggtagtaggttgt

SEQ ID NO: 7471 - DNA, 28 bp, Artificial Sequence
  Synthetic
cagtcatttgggtgaggtagtaggttgt

SEQ ID NO: 7472 - DNA, 28 bp, Artificial Sequence
  Synthetic
cagtcatttgggagaggtagtaggttgc

SEQ ID NO: 7473 - DNA, 28 bp, Artificial Sequence
  Synthetic
cagtcatttgggctatacgacctgctgc

SEQ ID NO: 7474 - DNA, 28 bp, Artificial Sequence
  Synthetic
cagtcatttgggtgaggtaggaggttgt

SEQ ID NO: 7475 - DNA, 28 bp, Artificial Sequence
  Synthetic
cagtcatttgggtgaggtagtagattgt

SEQ ID NO: 7476 - DNA, 28 bp, Artificial Sequence
  Synthetic
cagtcatttgggtgaggtagtagtttgt

SEQ ID NO: 7477 - DNA, 28 bp, Artificial Sequence
  Synthetic
cagtcatttgggtggaatgtaaagaagt

SEQ ID NO: 7478 - DNA, 28 bp, Artificial Sequence
  Synthetic
cagtcatttggggcacatacttctttat

SEQ ID NO: 7479 - DNA, 28 bp, Artificial Sequence
  Synthetic
cagtcatttgggaacccgtagatccgaa

SEQ ID NO: 7480 - DNA, 28 bp, Artificial Sequence
  Synthetic
cagtcatttgggtacagtactgtgataa

SEQ ID NO: 7481 - DNA, 28 bp, Artificial Sequence
  Synthetic
cagtcatttgggtacagtactgtgatag

SEQ ID NO: 7482 - DNA, 28 bp, Artificial Sequence
  Synthetic
cagtcatttgggagcagcattgtacagg

SEQ ID NO: 7483 - DNA, 28 bp, Artificial Sequence
  Synthetic
cagtcatttgggtaaagtgctgacagtg

SEQ ID NO: 7484 - DNA, 28 bp, Artificial Sequence
  Synthetic
cagtcatttgggagcagcattgtacagg

SEQ ID NO: 7485 - DNA, 28 bp, Artificial Sequence
  Synthetic
cagtcatttgggtaccctgtagatccga

SEQ ID NO: 7486 - DNA, 28 bp, Artificial Sequence
  Synthetic
cagtcatttgggccctgtagaaccgaat

SEQ ID NO: 7487 - DNA, 28 bp, Artificial Sequence
  Synthetic
cagtcatttgggtggagtgtgacaatgg

SEQ ID NO: 7488 - DNA, 28 bp, Artificial Sequence
  Synthetic
cagtcatttgggttaaggcacgcggtga

SEQ ID NO: 7489 - DNA, 28 bp, Artificial Sequence
  Synthetic
cagtcatttgggtccctgagacccttta

SEQ ID NO: 7490 - DNA, 28 bp, Artificial Sequence
  Synthetic
cagtcatttgggtccctgagaccctaac

SEQ ID NO: 7491 - DNA, 28 bp, Artificial Sequence
  Synthetic
cagtcatttgggtcgtaccgtgagtaat

SEQ ID NO: 7492 - DNA, 28 bp, Artificial Sequence
  Synthetic
cagtcatttgggcattattacttttggt

SEQ ID NO: 7493 - DNA, 28 bp, Artificial Sequence
  Synthetic
cagtcatttgggtcggatccgtctgagc

SEQ ID NO: 7494 - DNA, 28 bp, Artificial Sequence
  Synthetic
cagtcatttgggtcacagtgaaccggtc

SEQ ID NO: 7495 - DNA, 28 bp, Artificial Sequence
  Synthetic
cagtcatttgggtcacagtgaaccggtc

SEQ ID NO: 7496 - DNA, 28 bp, Artificial Sequence
  Synthetic
cagtcatttgggctttttgcggtctggg

SEQ ID NO: 7497 - DNA, 28 bp, Artificial Sequence
  Synthetic
cagtcatttgggaagcccttaccccaaa

SEQ ID NO: 7498 - DNA, 28 bp, Artificial Sequence
  Synthetic
cagtcatttgggcagtgcaatgttaaaa

SEQ ID NO: 7499 - DNA, 28 bp, Artificial Sequence
  Synthetic
cagtcatttgggcagtgcaatgatgaaa

SEQ ID NO: 7500 - DNA, 28 bp, Artificial Sequence
  Synthetic
cagtcatttgggtaacagtctacagcca

SEQ ID NO: 7501 - DNA, 28 bp, Artificial Sequence
  Synthetic
cagtcatttgggttggtccccttcaacc

SEQ ID NO: 7502 - DNA, 28 bp, Artificial Sequence
  Synthetic
cagtcatttgggttggtccccttcaacc

SEQ ID NO: 7503 - DNA, 28 bp, Artificial Sequence
  Synthetic
cagtcatttgggtgtgactggttgacca

SEQ ID NO: 7504 - DNA, 28 bp, Artificial Sequence
  Synthetic
cagtcatttgggtatggctttttattcc

SEQ ID NO: 7505 - DNA, 28 bp, Artificial Sequence
  Synthetic
cagtcatttgggtatggcttttcattcc

SEQ ID NO: 7506 - DNA, 28 bp, Artificial Sequence
  Synthetic
cagtcatttgggactccatttgttttga

SEQ ID NO: 7507 - DNA, 28 bp, Artificial Sequence
  Synthetic
cagtcatttgggtattgcttaagaatac

SEQ ID NO: 7508 - DNA, 28 bp, Artificial Sequence
  Synthetic
cagtcatttgggagctggtgttgtgaat

SEQ ID NO: 7509 - DNA, 28 bp, Artificial Sequence
  Synthetic
cagtcatttgggtctacagtgcacgtgt

SEQ ID NO: 7510 - DNA, 28 bp, Artificial Sequence
  Synthetic
cagtcatttgggagtggttttaccctat

SEQ ID NO: 7511 - DNA, 28 bp, Artificial Sequence
  Synthetic
cagtcatttgggtaccacagggtagaac

SEQ ID NO: 7512 - DNA, 28 bp, Artificial Sequence
  Synthetic
cagtcatttgggtaacactgtctggtaa

SEQ ID NO: 7513 - DNA, 28 bp, Artificial Sequence
  Synthetic
cagtcatttgggtgtagtgtttcctact

SEQ ID NO: 7514 - DNA, 28 bp, Artificial Sequence
  Synthetic
cagtcatttgggcataaagtagaaagca

SEQ ID NO: 7515 - DNA, 28 bp, Artificial Sequence
  Synthetic
cagtcatttgggtgagatgaagcactgt

SEQ ID NO: 7516 - DNA, 28 bp, Artificial Sequence
  Synthetic
cagtcatttgggtacagtatagatgatg

SEQ ID NO: 7517 - DNA, 28 bp, Artificial Sequence
  Synthetic
cagtcatttggggtccagttttcccagg

SEQ ID NO: 7518 - DNA, 28 bp, Artificial Sequence
  Synthetic
cagtcatttgggtgagaactgaattcca

SEQ ID NO: 7519 - DNA, 28 bp, Artificial Sequence
  Synthetic
cagtcatttgggtcagtgcatcacagaa

SEQ ID NO: 7520 - DNA, 28 bp, Artificial Sequence
  Synthetic
cagtcatttgggtctcccaacccttgta

SEQ ID NO: 7521 - DNA, 28 bp, Artificial Sequence
  Synthetic
cagtcatttgggactagactgaggctcc

SEQ ID NO: 7522 - DNA, 28 bp, Artificial Sequence
  Synthetic
cagtcatttgggtcgaggagctcacagt

SEQ ID NO: 7523 - DNA, 28 bp, Artificial Sequence
  Synthetic
cagtcatttgggtcagtgcatgacagaa

SEQ ID NO: 7524 - DNA, 28 bp, Artificial Sequence
  Synthetic
cagtcatttgggttgcatagtcacaaaa

SEQ ID NO: 7525 - DNA, 28 bp, Artificial Sequence
  Synthetic
cagtcatttgggtaggttatccgtgttg

SEQ ID NO: 7526 - DNA, 28 bp, Artificial Sequence
  Synthetic
cagtcatttgggtagcagcacatcatgg

SEQ ID NO: 7527 - DNA, 28 bp, Artificial Sequence
  Synthetic
cagtcatttgggtagcagcacgtaaata

SEQ ID NO: 7528 - DNA, 28 bp, Artificial Sequence
  Synthetic
cagtcatttgggcaaagtgcttacagtg

SEQ ID NO: 7529 - DNA, 28 bp, Artificial Sequence
  Synthetic
cagtcatttgggtaaggtgcatctagtg

SEQ ID NO: 7530 - DNA, 28 bp, Artificial Sequence
  Synthetic
cagtcatttgggaacattcaacgctgtc

SEQ ID NO: 7531 - DNA, 28 bp, Artificial Sequence
  Synthetic
cagtcatttgggaccatcgaccgttgat

SEQ ID NO: 7532 - DNA, 28 bp, Artificial Sequence
  Synthetic
cagtcatttgggaacattcattgctgtc

SEQ ID NO: 7533 - DNA, 28 bp, Artificial Sequence
  Synthetic
cagtcatttgggaacattcaacctgtcg

SEQ ID NO: 7534 - DNA, 28 bp, Artificial Sequence
  Synthetic
cagtcatttgggtatggcactggtagaa

SEQ ID NO: 7535 - DNA, 28 bp, Artificial Sequence
  Synthetic
cagtcatttgggtggacggagaactgat

SEQ ID NO: 7536 - DNA, 28 bp, Artificial Sequence
  Synthetic
cagtcatttgggtggagagaaaggcagt

SEQ ID NO: 7537 - DNA, 28 bp, Artificial Sequence
  Synthetic
cagtcatttgggcaaagaattctccttt

SEQ ID NO: 7538 - DNA, 28 bp, Artificial Sequence
  Synthetic
cagtcatttgggtcgtgtcttgtgttgc

SEQ ID NO: 7539 - DNA, 28 bp, Artificial Sequence
  Synthetic
cagtcatttggggtgcctactgagctga

SEQ ID NO: 7540 - DNA, 28 bp, Artificial Sequence
  Synthetic
cagtcatttgggtgatatgtttgatata

SEQ ID NO: 7541 - DNA, 28 bp, Artificial Sequence
  Synthetic
cagtcatttgggcaacggaatcccaaaa

SEQ ID NO: 7542 - DNA, 28 bp, Artificial Sequence
  Synthetic
cagtcatttgggctgacctatgaattga

SEQ ID NO: 7543 - DNA, 28 bp, Artificial Sequence
  Synthetic
cagtcatttgggaactggcctacaaagt

SEQ ID NO: 7544 - DNA, 28 bp, Artificial Sequence
  Synthetic
cagtcatttgggtgtaacagcaactcca

SEQ ID NO: 7545 - DNA, 28 bp, Artificial Sequence
  Synthetic
cagtcatttgggtagcagcacagaaata

SEQ ID NO: 7546 - DNA, 28 bp, Artificial Sequence
  Synthetic
cagtcatttgggtaggtagtttcatgtt

SEQ ID NO: 7547 - DNA, 28 bp, Artificial Sequence
  Synthetic
cagtcatttgggtaggtagtttcctgtt

SEQ ID NO: 7548 - DNA, 28 bp, Artificial Sequence
  Synthetic
cagtcatttgggcccagtgttcagacta

SEQ ID NO: 7549 - DNA, 28 bp, Artificial Sequence
  Synthetic
cagtcatttgggtgtgcaaatctatgca

SEQ ID NO: 7550 - DNA, 28 bp, Artificial Sequence
  Synthetic
cagtcatttgggtgtgcaaatccatgca

SEQ ID NO: 7551 - DNA, 28 bp, Artificial Sequence
  Synthetic
cagtcatttgggtaacactgtctggtaa

SEQ ID NO: 7552 - DNA, 28 bp, Artificial Sequence
  Synthetic
cagtcatttgggtaatactgcctggtaa

SEQ ID NO: 7553 - DNA, 28 bp, Artificial Sequence
  Synthetic
cagtcatttgggtaatactgccgggtaa

SEQ ID NO: 7554 - DNA, 28 bp, Artificial Sequence
  Synthetic
cagtcatttggggtgaaatgtttaggac

SEQ ID NO: 7555 - DNA, 28 bp, Artificial Sequence
  Synthetic
cagtcatttgggttccctttgtcatcct

SEQ ID NO: 7556 - DNA, 28 bp, Artificial Sequence
  Synthetic
cagtcatttgggtccttcattccaccgg

SEQ ID NO: 7557 - DNA, 28 bp, Artificial Sequence
  Synthetic
cagtcatttgggtggaatgtaaggaagt

SEQ ID NO: 7558 - DNA, 28 bp, Artificial Sequence
  Synthetic
cagtcatttggggcttctcctggctctc

SEQ ID NO: 7559 - DNA, 28 bp, Artificial Sequence
  Synthetic
cagtcatttgggataagacgagcaaaaa

SEQ ID NO: 7560 - DNA, 28 bp, Artificial Sequence
  Synthetic
cagtcatttgggtaaagtgcttatagtg

SEQ ID NO: 7561 - DNA, 28 bp, Artificial Sequence
  Synthetic
cagtcatttgggactgcattacgagcac

SEQ ID NO: 7562 - DNA, 28 bp, Artificial Sequence
  Synthetic
cagtcatttgggcaaagtgctcatagtg

SEQ ID NO: 7563 - DNA, 28 bp, Artificial Sequence
  Synthetic
cagtcatttgggactgcagtgtgagcac

SEQ ID NO: 7564 - DNA, 28 bp, Artificial Sequence
  Synthetic
cagtcatttgggtagcttatcagactga

SEQ ID NO: 7565 - DNA, 28 bp, Artificial Sequence
  Synthetic
cagtcatttgggctgtgcgtgtgacagc

SEQ ID NO: 7566 - DNA, 28 bp, Artificial Sequence
  Synthetic
cagtcatttgggttccctttgtcatcct

SEQ ID NO: 7567 - DNA, 28 bp, Artificial Sequence
  Synthetic
cagtcatttgggtaacagtctccagtca

SEQ ID NO: 7568 - DNA, 28 bp, Artificial Sequence
  Synthetic
cagtcatttgggacagcaggcacagaca

SEQ ID NO: 7569 - DNA, 28 bp, Artificial Sequence
  Synthetic
cagtcatttgggatgacctatgatttga

SEQ ID NO: 7570 - DNA, 28 bp, Artificial Sequence
  Synthetic
cagtcatttgggtaatctcagctggcaa

SEQ ID NO: 7571 - DNA, 28 bp, Artificial Sequence
  Synthetic
cagtcatttgggtactgcatcaggaact

SEQ ID NO: 7572 - DNA, 28 bp, Artificial Sequence
  Synthetic
cagtcatttgggttgtgcttgatctaac

SEQ ID NO: 7573 - DNA, 28 bp, Artificial Sequence
  Synthetic
cagtcatttgggtgattgtccaaacgca

SEQ ID NO: 7574 - DNA, 28 bp, Artificial Sequence
  Synthetic
cagtcatttgggaagctgccagttgaag

SEQ ID NO: 7575 - DNA, 28 bp, Artificial Sequence
  Synthetic
cagtcatttgggagttcttcagtggcaa

SEQ ID NO: 7576 - DNA, 28 bp, Artificial Sequence
  Synthetic
cagtcatttgggagctacattgtctgct

SEQ ID NO: 7577 - DNA, 28 bp, Artificial Sequence
  Synthetic
cagtcatttgggagctacatctggctac

SEQ ID NO: 7578 - DNA, 28 bp, Artificial Sequence
  Synthetic
cagtcatttgggtgtcagtttgtcaaat

SEQ ID NO: 7579 - DNA, 28 bp, Artificial Sequence
  Synthetic
cagtcatttgggcaagtcactagtggtt

SEQ ID NO: 7580 - DNA, 28 bp, Artificial Sequence
  Synthetic
cagtcatttgggatcacattgccaggga

SEQ ID NO: 7581 - DNA, 28 bp, Artificial Sequence
  Synthetic
cagtcatttgggatcacattgccaggga

SEQ ID NO: 7582 - DNA, 28 bp, Artificial Sequence
  Synthetic
cagtcatttgggtggctcagttcagcag

SEQ ID NO: 7583 - DNA, 28 bp, Artificial Sequence
  Synthetic
cagtcatttgggcattgcacttgtctcg

SEQ ID NO: 7584 - DNA, 28 bp, Artificial Sequence
  Synthetic
cagtcatttgggttcaagtaatccagga

SEQ ID NO: 7585 - DNA, 28 bp, Artificial Sequence
  Synthetic
cagtcatttgggttcaagtaattcagga

SEQ ID NO: 7586 - DNA, 28 bp, Artificial Sequence
  Synthetic
cagtcatttgggttcacagtggctaagt

SEQ ID NO: 7587 - DNA, 28 bp, Artificial Sequence
  Synthetic
cagtcatttgggttcacagtggctaagt

SEQ ID NO: 7588 - DNA, 28 bp, Artificial Sequence
  Synthetic
cagtcatttgggaaggagctcacagtct

SEQ ID NO: 7589 - DNA, 28 bp, Artificial Sequence
  Synthetic
cagtcatttgggctcaaactatgggggc

SEQ ID NO: 7590 - DNA, 28 bp, Artificial Sequence
  Synthetic
cagtcatttgggaaagtgcttccacttt

SEQ ID NO: 7591 - DNA, 28 bp, Artificial Sequence
  Synthetic
cagtcatttgggcatcaaagtggaggcc

SEQ ID NO: 7592 - DNA, 28 bp, Artificial Sequence
  Synthetic
cagtcatttgggaagtgccgccaggttt

SEQ ID NO: 7593 - DNA, 28 bp, Artificial Sequence
  Synthetic
cagtcatttgggactcaaactgggggct

SEQ ID NO: 7594 - DNA, 28 bp, Artificial Sequence
  Synthetic
cagtcatttgggagggccccccctcaat

SEQ ID NO: 7595 - DNA, 28 bp, Artificial Sequence
  Synthetic
cagtcatttgggatgtatgtgtgcatgt

SEQ ID NO: 7596 - DNA, 28 bp, Artificial Sequence
  Synthetic
cagtcatttgggggcagaggagggctgt

SEQ ID NO: 7597 - DNA, 28 bp, Artificial Sequence
  Synthetic
cagtcatttgggtggtttaccgtcccac

SEQ ID NO: 7598 - DNA, 28 bp, Artificial Sequence
  Synthetic
cagtcatttgggtagcaccatctgaaat

SEQ ID NO: 7599 - DNA, 28 bp, Artificial Sequence
  Synthetic
cagtcatttgggtagcaccatttgaaat

SEQ ID NO: 7600 - DNA, 28 bp, Artificial Sequence
  Synthetic
cagtcatttgggtagcaccatttgaaat

SEQ ID NO: 7601 - DNA, 28 bp, Artificial Sequence
  Synthetic
cagtcatttgggtgaccgatttctcctg

SEQ ID NO: 7602 - DNA, 28 bp, Artificial Sequence
  Synthetic
cagtcatttgggtatgcaagggcaagct

SEQ ID NO: 7603 - DNA, 28 bp, Artificial Sequence
  Synthetic
cagtcatttgggcagtgcaatagtattg

SEQ ID NO: 7604 - DNA, 28 bp, Artificial Sequence
  Synthetic
cagtcatttgggctttcagtcggatgtt

SEQ ID NO: 7605 - DNA, 28 bp, Artificial Sequence
  Synthetic
cagtcatttgggtgtaaacatcctcgac

SEQ ID NO: 7606 - DNA, 28 bp, Artificial Sequence
  Synthetic
cagtcatttgggtgtaaacatcctacac

SEQ ID NO: 7607 - DNA, 28 bp, Artificial Sequence
  Synthetic
cagtcatttgggtgtaaacatcctacac

SEQ ID NO: 7608 - DNA, 28 bp, Artificial Sequence
  Synthetic
cagtcatttgggtgtaaacatccccgac

SEQ ID NO: 7609 - DNA, 28 bp, Artificial Sequence
  Synthetic
cagtcatttgggtgtaaacatccttgac

SEQ ID NO: 7610 - DNA, 28 bp, Artificial Sequence
  Synthetic
cagtcatttgggaggcaagatgctggca

SEQ ID NO: 7611 - DNA, 28 bp, Artificial Sequence
  Synthetic
cagtcatttgggtattgcacattactaa

SEQ ID NO: 7612 - DNA, 28 bp, Artificial Sequence
  Synthetic
cagtcatttgggaaaagctgggttgaga

SEQ ID NO: 7613 - DNA, 28 bp, Artificial Sequence
  Synthetic
cagtcatttgggaaacatgaagcgctgc

SEQ ID NO: 7614 - DNA, 28 bp, Artificial Sequence
  Synthetic
cagtcatttggggcacattacacggtcg

SEQ ID NO: 7615 - DNA, 28 bp, Artificial Sequence
  Synthetic
cagtcatttgggccactgccccaggtgc

SEQ ID NO: 7616 - DNA, 28 bp, Artificial Sequence
  Synthetic
cagtcatttgggcgcatcccctagggca

SEQ ID NO: 7617 - DNA, 28 bp, Artificial Sequence
  Synthetic
cagtcatttgggcctagtaggtgctcag

SEQ ID NO: 7618 - DNA, 28 bp, Artificial Sequence
  Synthetic
cagtcatttgggcctctgggcccttcct

SEQ ID NO: 7619 - DNA, 28 bp, Artificial Sequence
  Synthetic
cagtcatttgggccttgaggggcatgag

SEQ ID NO: 7620 - DNA, 28 bp, Artificial Sequence
  Synthetic
cagtcatttgggctggccctctctgccc

SEQ ID NO: 7621 - DNA, 28 bp, Artificial Sequence
  Synthetic
cagtcatttgggaacacacccagctaac

SEQ ID NO: 7622 - DNA, 28 bp, Artificial Sequence
  Synthetic
cagtcatttggggtgcattgtagttgca

SEQ ID NO: 7623 - DNA, 28 bp, Artificial Sequence
  Synthetic
cagtcatttggggcaaagcacagggcct

SEQ ID NO: 7624 - DNA, 28 bp, Artificial Sequence
  Synthetic
cagtcatttggggcccctgggcctatcc

SEQ ID NO: 7625 - DNA, 28 bp, Artificial Sequence
  Synthetic
cagtcatttggggtggtgtgctagttac

SEQ ID NO: 7626 - DNA, 28 bp, Artificial Sequence
  Synthetic
cagtcatttgggtcaagagcaataacga

SEQ ID NO: 7627 - DNA, 28 bp, Artificial Sequence
  Synthetic
cagtcatttgggtcacccttccatatct

SEQ ID NO: 7628 - DNA, 28 bp, Artificial Sequence
  Synthetic
cagtcatttgggttcagctcctatatga

SEQ ID NO: 7629 - DNA, 28 bp, Artificial Sequence
  Synthetic
cagtcatttgggtccagcatcagtgatt

SEQ ID NO: 7630 - DNA, 28 bp, Artificial Sequence
  Synthetic
cagtcatttgggtccctgtcctccagga

SEQ ID NO: 7631 - DNA, 28 bp, Artificial Sequence
  Synthetic
cagtcatttgggtccgtctcagttactt

SEQ ID NO: 7632 - DNA, 28 bp, Artificial Sequence
  Synthetic
cagtcatttgggtcgatcggtcggtcgg

SEQ ID NO: 7633 - DNA, 28 bp, Artificial Sequence
  Synthetic
cagtcatttgggtctcacacagaaatcg

SEQ ID NO: 7634 - DNA, 28 bp, Artificial Sequence
  Synthetic
cagtcatttgggtctccctccgtgtgcc

SEQ ID NO: 7635 - DNA, 28 bp, Artificial Sequence
  Synthetic
cagtcatttgggtgatctagccaaagcc

SEQ ID NO: 7636 - DNA, 28 bp, Artificial Sequence
  Synthetic
cagtcatttgggtgctgacccctagtcc

SEQ ID NO: 7637 - DNA, 28 bp, Artificial Sequence
  Synthetic
cagtcatttgggtgtctgcctgagtgcc

SEQ ID NO: 7638 - DNA, 28 bp, Artificial Sequence
  Synthetic
cagtcatttgggtgtccctctgggtcgc

SEQ ID NO: 7639 - DNA, 28 bp, Artificial Sequence
  Synthetic
cagtcatttgggcagccctgctgtctta

SEQ ID NO: 7640 - DNA, 28 bp, Artificial Sequence
  Synthetic
cagtcatttgggtggcagtgtcttagct

SEQ ID NO: 7641 - DNA, 28 bp, Artificial Sequence
  Synthetic
cagtcatttgggtaggcagtgtaattag

SEQ ID NO: 7642 - DNA, 28 bp, Artificial Sequence
  Synthetic
cagtcatttgggaggcagtgtagttagc

SEQ ID NO: 7643 - DNA, 28 bp, Artificial Sequence
  Synthetic
cagtcatttgggttcacaaagcccatac

SEQ ID NO: 7644 - DNA, 28 bp, Artificial Sequence
  Synthetic
cagtcatttgggtccctgaggagccctt

SEQ ID NO: 7645 - DNA, 28 bp, Artificial Sequence
  Synthetic
cagtcatttgggagagtagtaggttgca

SEQ ID NO: 7646 - DNA, 28 bp, Artificial Sequence
  Synthetic
cagtcatttgggttatcagaatctccag

SEQ ID NO: 7647 - DNA, 28 bp, Artificial Sequence
  Synthetic
cagtcatttgggaattgcacggtatcca

SEQ ID NO: 7648 - DNA, 28 bp, Artificial Sequence
  Synthetic
cagtcatttgggcgggtggatcacgatg

SEQ ID NO: 7649 - DNA, 28 bp, Artificial Sequence
  Synthetic
cagtcatttgggtaatgcccctaaaaat

SEQ ID NO: 7650 - DNA, 28 bp, Artificial Sequence
  Synthetic
cagtcatttgggaataatacatggttga

SEQ ID NO: 7651 - DNA, 28 bp, Artificial Sequence
  Synthetic
cagtcatttgggagatcgaccgtgttat

SEQ ID NO: 7652 - DNA, 28 bp, Artificial Sequence
  Synthetic
cagtcatttggggcctgctggggtggaa

SEQ ID NO: 7653 - DNA, 28 bp, Artificial Sequence
  Synthetic
cagtcatttgggatataatacaacctgc

SEQ ID NO: 7654 - DNA, 28 bp, Artificial Sequence
  Synthetic
cagtcatttgggatcgtagaggaaaatc

SEQ ID NO: 7655 - DNA, 28 bp, Artificial Sequence
  Synthetic
cagtcatttgggggtagattctccttct

SEQ ID NO: 7656 - DNA, 28 bp, Artificial Sequence
  Synthetic
cagtcatttgggatcatagaggaacatc

SEQ ID NO: 7657 - DNA, 28 bp, Artificial Sequence
  Synthetic
cagtcatttggggtggatattccttcta

SEQ ID NO: 7658 - DNA, 28 bp, Artificial Sequence
  Synthetic
cagtcatttgggaacatagaggaaattt

SEQ ID NO: 7659 - DNA, 28 bp, Artificial Sequence
  Synthetic
cagtcatttgggatcacacaaaggcaac

SEQ ID NO: 7660 - DNA, 28 bp, Artificial Sequence
  Synthetic
cagtcatttgggctcctgactccaggtc

SEQ ID NO: 7661 - DNA, 28 bp, Artificial Sequence
  Synthetic
cagtcatttgggtggtagactatggaac

SEQ ID NO: 7662 - DNA, 28 bp, Artificial Sequence
  Synthetic
cagtcatttgggtatacaagggcaagct

SEQ ID NO: 7663 - DNA, 28 bp, Artificial Sequence
  Synthetic
cagtcatttggggaagttgttcgtggtg

SEQ ID NO: 7664 - DNA, 28 bp, Artificial Sequence
  Synthetic
cagtcatttgggaatcattcacggacaa

SEQ ID NO: 7665 - DNA, 28 bp, Artificial Sequence
  Synthetic
cagtcatttgggagatcagaaggtgact

SEQ ID NO: 7666 - DNA, 28 bp, Artificial Sequence
  Synthetic
cagtcatttgggaatgttgctcggtgaa

SEQ ID NO: 7667 - DNA, 28 bp, Artificial Sequence
  Synthetic
cagtcatttgggaggttacccgagcaac

SEQ ID NO: 7668 - DNA, 28 bp, Artificial Sequence
  Synthetic
cagtcatttgggacttcacctggtccac

SEQ ID NO: 7669 - DNA, 28 bp, Artificial Sequence
  Synthetic
cagtcatttgggggcctcattaaatgtt

SEQ ID NO: 7670 - DNA, 28 bp, Artificial Sequence
  Synthetic
cagtcatttgggactggacttggagtca

SEQ ID NO: 7671 - DNA, 28 bp, Artificial Sequence
  Synthetic
cagtcatttgggcagcagcaattcatgt

SEQ ID NO: 7672 - DNA, 28 bp, Artificial Sequence
  Synthetic
cagtcatttgggtaatactgtctggtaa

SEQ ID NO: 7673 - DNA, 28 bp, Artificial Sequence
  Synthetic
cagtcatttgggtgtcttgcaggccgtc

SEQ ID NO: 7674 - DNA, 28 bp, Artificial Sequence
  Synthetic
cagtcatttgggatcatgatgggctcct

SEQ ID NO: 7675 - DNA, 28 bp, Artificial Sequence
  Synthetic
cagtcatttgggttgcatatgtaggatg

SEQ ID NO: 7676 - DNA, 28 bp, Artificial Sequence
  Synthetic
cagtcatttgggtggcagtgtattgtta

SEQ ID NO: 7677 - DNA, 28 bp, Artificial Sequence
  Synthetic
cagtcatttgggtttttgcgatgtgttc

SEQ ID NO: 7678 - DNA, 28 bp, Artificial Sequence
  Synthetic
cagtcatttgggaaaccgttaccattac

SEQ ID NO: 7679 - DNA, 28 bp, Artificial Sequence
  Synthetic
cagtcatttgggtcactcctcccctccc

SEQ ID NO: 7680 - DNA, 28 bp, Artificial Sequence
  Synthetic
cagtcatttgggagaggctggccgtgat

SEQ ID NO: 7681 - DNA, 28 bp, Artificial Sequence
  Synthetic
cagtcatttgggaatcgtacagggtcat

SEQ ID NO: 7682 - DNA, 28 bp, Artificial Sequence
  Synthetic
cagtcatttgggaatgacatcacatata

SEQ ID NO: 7683 - DNA, 28 bp, Artificial Sequence
  Synthetic
cagtcatttgggtgaaggtctactgtgt

SEQ ID NO: 7684 - DNA, 28 bp, Artificial Sequence
  Synthetic
cagtcatttgggtgaaacatacacggga

SEQ ID NO: 7685 - DNA, 28 bp, Artificial Sequence
  Synthetic
cagtcatttgggcagcagcacactgtgg

SEQ ID NO: 7686 - DNA, 28 bp, Artificial Sequence
  Synthetic
cagtcatttgggttaagacttgcagtga

SEQ ID NO: 7687 - DNA, 28 bp, Artificial Sequence
  Synthetic
cagtcatttgggaatcctttgtccctgg

SEQ ID NO: 7688 - DNA, 28 bp, Artificial Sequence
  Synthetic
cagtcatttgggtagcagcgggaacagt

SEQ ID NO: 7689 - DNA, 28 bp, Artificial Sequence
  Synthetic
cagtcatttggggtcaacacttgctggt

SEQ ID NO: 7690 - DNA, 28 bp, Artificial Sequence
  Synthetic
cagtcatttgggggagaaattatccttg

SEQ ID NO: 7691 - DNA, 28 bp, Artificial Sequence
  Synthetic
cagtcatttgggaggtcagaggtcgatc

SEQ ID NO: 7692 - DNA, 28 bp, Artificial Sequence
  Synthetic
cagtcatttgggaagggattctgatgtt

SEQ ID NO: 7693 - DNA, 28 bp, Artificial Sequence
  Synthetic
cagtcatttgggtgtgacagattgataa

SEQ ID NO: 7694 - DNA, 28 bp, Artificial Sequence
  Synthetic
cagtcatttgggctcggggatcatcatg

SEQ ID NO: 7695 - DNA, 28 bp, Artificial Sequence
  Synthetic
cagtcatttgggaaacattcgcggtgca

SEQ ID NO: 7696 - DNA, 28 bp, Artificial Sequence
  Synthetic
cagtcatttgggtattcatttactcccc

SEQ ID NO: 7697 - DNA, 28 bp, Artificial Sequence
  Synthetic
cagtcatttgggtggaagactagtgatt

SEQ ID NO: 7698 - DNA, 28 bp, Artificial Sequence
  Synthetic
cagtcatttgggcaacaaatcacagtct

SEQ ID NO: 7699 - DNA, 28 bp, Artificial Sequence
  Synthetic
cagtcatttgggtggaagacttgtgatt

SEQ ID NO: 7700 - DNA, 28 bp, Artificial Sequence
  Synthetic
cagtcatttgggtctttggttatctagc

SEQ ID NO: 7701 - DNA, 28 bp, Artificial Sequence
  Synthetic
cagtcatttgggtattgcacttgtcccg

SEQ ID NO: 7702 - DNA, 28 bp, Artificial Sequence
  Synthetic
cagtcatttgggcaaagtgctgttcgtg

SEQ ID NO: 7703 - DNA, 28 bp, Artificial Sequence
  Synthetic
cagtcatttgggtttggcactagcacat

SEQ ID NO: 7704 - DNA, 28 bp, Artificial Sequence
  Synthetic
cagtcatttgggtgaggtagtaagttgt

SEQ ID NO: 7705 - DNA, 28 bp, Artificial Sequence
  Synthetic
cagtcatttgggaacccgtagatccgat

SEQ ID NO: 7706 - DNA, 28 bp, Artificial Sequence
  Synthetic
cagtcatttgggcacccgtagaaccgac

SEQ ID NO: 7707 - DNA, 28 bp, Artificial Sequence
  Synthetic
cagtcatttgggtgacagaagagagtga

SEQ ID NO: 7708 - DNA, 28 bp, Artificial Sequence
  Synthetic
cagtcatttgggtgacagaagagagtga

SEQ ID NO: 7709 - DNA, 28 bp, Artificial Sequence
  Synthetic
cagtcatttgggtgacagaagagagtga

SEQ ID NO: 7710 - DNA, 28 bp, Artificial Sequence
  Synthetic
cagtcatttgggtgacagaagagagaga

SEQ ID NO: 7711 - DNA, 28 bp, Artificial Sequence
  Synthetic
cagtcatttgggtgacagaagagagcga

SEQ ID NO: 7712 - DNA, 28 bp, Artificial Sequence
  Synthetic
cagtcatttgggtttggattgaagggag

SEQ ID NO: 7713 - DNA, 28 bp, Artificial Sequence
  Synthetic
cagtcatttgggcttggattgaagggag

SEQ ID NO: 7714 - DNA, 28 bp, Artificial Sequence
  Synthetic
cagtcatttgggtgcctggctccctgta

SEQ ID NO: 7715 - DNA, 28 bp, Artificial Sequence
  Synthetic
cagtcatttgggtgcctggctccctgta

SEQ ID NO: 7716 - DNA, 28 bp, Artificial Sequence
  Synthetic
cagtcatttgggtgcctggctccctgta

SEQ ID NO: 7717 - DNA, 28 bp, Artificial Sequence
  Synthetic
cagtcatttgggtgcctggctccctgta

SEQ ID NO: 7718 - DNA, 28 bp, Artificial Sequence
  Synthetic
cagtcatttgggtgcctggctccctgta

SEQ ID NO: 7719 - DNA, 28 bp, Artificial Sequence
  Synthetic
cagtcatttgggtggagaagcagggcac

SEQ ID NO: 7720 - DNA, 28 bp, Artificial Sequence
  Synthetic
cagtcatttgggtggagaagcagggcac

SEQ ID NO: 7721 - DNA, 28 bp, Artificial Sequence
  Synthetic
cagtcatttgggtggagaagcaggacac

SEQ ID NO: 7722 - DNA, 28 bp, Artificial Sequence
  Synthetic
cagtcatttgggtcggaccaggcttcat

SEQ ID NO: 7723 - DNA, 28 bp, Artificial Sequence
  Synthetic
cagtcatttgggtcggaccaggcttcat

SEQ ID NO: 7724 - DNA, 28 bp, Artificial Sequence
  Synthetic
cagtcatttgggtcggaccaggcttcat

SEQ ID NO: 7725 - DNA, 28 bp, Artificial Sequence
  Synthetic
cagtcatttgggtcggaccaggcttcat

SEQ ID NO: 7726 - DNA, 28 bp, Artificial Sequence
  Synthetic
cagtcatttgggtcggaccaggcttcaa

SEQ ID NO: 7727 - DNA, 28 bp, Artificial Sequence
  Synthetic
cagtcatttgggtcggaccaggcttcat

SEQ ID NO: 7728 - DNA, 28 bp, Artificial Sequence
  Synthetic
cagtcatttgggtcggaccaggcttcaa

SEQ ID NO: 7729 - DNA, 28 bp, Artificial Sequence
  Synthetic
cagtcatttgggtgaagctgccagcatg

SEQ ID NO: 7730 - DNA, 28 bp, Artificial Sequence
  Synthetic
cagtcatttgggtgaagctgccagcatg

SEQ ID NO: 7731 - DNA, 28 bp, Artificial Sequence
  Synthetic
cagtcatttgggtgaagctgccagcatg

SEQ ID NO: 7732 - DNA, 28 bp, Artificial Sequence
  Synthetic
cagtcatttgggtgaagctgccagcatg

SEQ ID NO: 7733 - DNA, 28 bp, Artificial Sequence
  Synthetic
cagtcatttgggtgaagctgccagcatg

SEQ ID NO: 7734 - DNA, 28 bp, Artificial Sequence
  Synthetic
cagtcatttgggtgaagctgccagcatg

SEQ ID NO: 7735 - DNA, 28 bp, Artificial Sequence
  Synthetic
cagtcatttgggtgaagctgccagcatg

SEQ ID NO: 7736 - DNA, 28 bp, Artificial Sequence
  Synthetic
cagtcatttgggtcgcttggtgcagatc

SEQ ID NO: 7737 - DNA, 28 bp, Artificial Sequence
  Synthetic
cagtcatttgggcagccaaggatgactt

SEQ ID NO: 7738 - DNA, 28 bp, Artificial Sequence
  Synthetic
cagtcatttgggcagccaaggatgactt

SEQ ID NO: 7739 - DNA, 28 bp, Artificial Sequence
  Synthetic
cagtcatttgggtagccaaggatgactt

SEQ ID NO: 7740 - DNA, 28 bp, Artificial Sequence
  Synthetic
cagtcatttgggtagccaaggatgactt

SEQ ID NO: 7741 - DNA, 28 bp, Artificial Sequence
  Synthetic
cagtcatttgggtagccaaggatgactt

SEQ ID NO: 7742 - DNA, 28 bp, Artificial Sequence
  Synthetic
cagtcatttgggtagccaaggatgactt

SEQ ID NO: 7743 - DNA, 28 bp, Artificial Sequence
  Synthetic
cagtcatttgggtagccaaggatgactt

SEQ ID NO: 7744 - DNA, 28 bp, Artificial Sequence
  Synthetic
cagtcatttgggtagccaaggatgactt

SEQ ID NO: 7745 - DNA, 28 bp, Artificial Sequence
  Synthetic
cagtcatttgggtagccaagaatgactt

SEQ ID NO: 7746 - DNA, 28 bp, Artificial Sequence
  Synthetic
cagtcatttgggtgattgagccgtgcca

SEQ ID NO: 7747 - DNA, 28 bp, Artificial Sequence
  Synthetic
cagtcatttgggtgattgagccgtgcca

SEQ ID NO: 7748 - DNA, 28 bp, Artificial Sequence
  Synthetic
cagtcatttggggaggtgagccgagcca

SEQ ID NO: 7749 - DNA, 28 bp, Artificial Sequence
  Synthetic
cagtcatttgggtgattgagccgtgcca

SEQ ID NO: 7750 - DNA, 28 bp, Artificial Sequence
  Synthetic
cagtcatttggggtgagccgaaccaata

SEQ ID NO: 7751 - DNA, 28 bp, Artificial Sequence
  Synthetic
cagtcatttgggatgagccgaaccaata

SEQ ID NO: 7752 - DNA, 28 bp, Artificial Sequence
  Synthetic
cagtcatttgggagaatcttgatgatgc

SEQ ID NO: 7753 - DNA, 28 bp, Artificial Sequence
  Synthetic
cagtcatttgggggaatcttgatgatgc

SEQ ID NO: 7754 - DNA, 28 bp, Artificial Sequence
  Synthetic
cagtcatttgggagaatcttgatgatgc

SEQ ID NO: 7755 - DNA, 28 bp, Artificial Sequence
  Synthetic
cagtcatttgggagaatcttgatgatgc

SEQ ID NO: 7756 - DNA, 28 bp, Artificial Sequence
  Synthetic
cagtcatttgggtgaatcttgatgatgc

SEQ ID NO: 7757 - DNA, 28 bp, Artificial Sequence
  Synthetic
cagtcatttgggttggactgaagggtgc

SEQ ID NO: 7758 - DNA, 28 bp, Artificial Sequence
  Synthetic
cagtcatttgggtccaaagggatcgcat

SEQ ID NO: 7759 - DNA, 28 bp, Artificial Sequence
  Synthetic
cagtcatttgggttggcattctgtccac

SEQ ID NO: 7760 - DNA, 28 bp, Artificial Sequence
  Synthetic
cagtcatttgggttggcattctgtccac

SEQ ID NO: 7761 - DNA, 28 bp, Artificial Sequence
  Synthetic
cagtcatttggggtgaagtgtttggggg

SEQ ID NO: 7762 - DNA, 28 bp, Artificial Sequence
  Synthetic
cagtcatttggggtgaagtgtttggggg

SEQ ID NO: 7763 - DNA, 28 bp, Artificial Sequence
  Synthetic
cagtcatttggggtgaagtgtttggggg

SEQ ID NO: 7764 - DNA, 28 bp, Artificial Sequence
  Synthetic
cagtcatttggggtgaagtgtttggggg

SEQ ID NO: 7765 - DNA, 28 bp, Artificial Sequence
  Synthetic
cagtcatttggggtgaagtgtttggggg

SEQ ID NO: 7766 - DNA, 28 bp, Artificial Sequence
  Synthetic
cagtcatttgggatgaagtgtttggggg

SEQ ID NO: 7767 - DNA, 28 bp, Artificial Sequence
  Synthetic
cagtcatttgggttccacagctttcttg

SEQ ID NO: 7768 - DNA, 28 bp, Artificial Sequence
  Synthetic
cagtcatttgggttccacagctttcttg

SEQ ID NO: 7769 - DNA, 28 bp, Artificial Sequence
  Synthetic
cagtcatttgggttccacagctttcttg

SEQ ID NO: 7770 - DNA, 28 bp, Artificial Sequence
  Synthetic
cagtcatttgggtgccaaaggagaattg

SEQ ID NO: 7771 - DNA, 28 bp, Artificial Sequence
  Synthetic
cagtcatttgggtgccaaaggagagctg

SEQ ID NO: 7772 - DNA, 28 bp, Artificial Sequence
  Synthetic
cagtcatttgggtgccaaaggagaattg

SEQ ID NO: 7773 - DNA, 28 bp, Artificial Sequence
  Synthetic
cagtcatttgggtgccaaaggagagttg

SEQ ID NO: 7774 - DNA, 28 bp, Artificial Sequence
  Synthetic
cagtcatttgggtgccaaaggagatttg

SEQ ID NO: 7775 - DNA, 28 bp, Artificial Sequence
  Synthetic
cagtcatttgggtgccaaaggagatttg

SEQ ID NO: 7776 - DNA, 28 bp, Artificial Sequence
  Synthetic
cagtcatttgggtgccaaaggaaatttg

SEQ ID NO: 7777 - DNA, 28 bp, Artificial Sequence
  Synthetic
cagtcatttgggtgccaaaggagaattg

SEQ ID NO: 7778 - DNA, 28 bp, Artificial Sequence
  Synthetic
cagtcatttgggtgccaaaggagagttg

SEQ ID NO: 7779 - DNA, 28 bp, Artificial Sequence
  Synthetic
cagtcatttgggaacccgtagatccgaa

SEQ ID NO: 7780 - DNA, 28 bp, Artificial Sequence
  Synthetic
cagtcatttgggtacagtactgtgataa

SEQ ID NO: 7781 - DNA, 28 bp, Artificial Sequence
  Synthetic
cagtcatttgggtcaaatgctcagactc

SEQ ID NO: 7782 - DNA, 28 bp, Artificial Sequence
  Synthetic
cagtcatttgggaaaagtgcttacagtg

SEQ ID NO: 7783 - DNA, 28 bp, Artificial Sequence
  Synthetic
cagtcatttgggtaaagtgctgacagtg

SEQ ID NO: 7784 - DNA, 28 bp, Artificial Sequence
  Synthetic
cagtcatttgggtaccctgtagatccga

SEQ ID NO: 7785 - DNA, 28 bp, Artificial Sequence
  Synthetic
cagtcatttgggtccctgagaccctaac

SEQ ID NO: 7786 - DNA, 28 bp, Artificial Sequence
  Synthetic
cagtcatttgggtcggatccgtctgagc

SEQ ID NO: 7787 - DNA, 28 bp, Artificial Sequence
  Synthetic
cagtcatttgggtcacagtgaaccggtc

SEQ ID NO: 7788 - DNA, 28 bp, Artificial Sequence
  Synthetic
cagtcatttgggttggtccccttcaacc

SEQ ID NO: 7789 - DNA, 28 bp, Artificial Sequence
  Synthetic
cagtcatttggggtgtgtggaaatgctt

SEQ ID NO: 7790 - DNA, 28 bp, Artificial Sequence
  Synthetic
cagtcatttgggtagcagcacataatgg

SEQ ID NO: 7791 - DNA, 28 bp, Artificial Sequence
  Synthetic
cagtcatttgggtagcagcacgtaaata

SEQ ID NO: 7792 - DNA, 28 bp, Artificial Sequence
  Synthetic
cagtcatttgggactgcagtgaaggcac

SEQ ID NO: 7793 - DNA, 28 bp, Artificial Sequence
  Synthetic
cagtcatttgggcaaagtgcttacagtg

SEQ ID NO: 7794 - DNA, 28 bp, Artificial Sequence
  Synthetic
cagtcatttgggtaaggtgcatctagtg

SEQ ID NO: 7795 - DNA, 28 bp, Artificial Sequence
  Synthetic
cagtcatttgggaacattcaacgctgtc

SEQ ID NO: 7796 - DNA, 28 bp, Artificial Sequence
  Synthetic
cagtcatttgggtatggcactggtagaa

SEQ ID NO: 7797 - DNA, 28 bp, Artificial Sequence
  Synthetic
cagtcatttgggggtccagaggggagct

SEQ ID NO: 7798 - DNA, 28 bp, Artificial Sequence
  Synthetic
cagtcatttgggcccagtgttcagacta

SEQ ID NO: 7799 - DNA, 28 bp, Artificial Sequence
  Synthetic
cagtcatttgggtgtgcaaatctatgca

SEQ ID NO: 7800 - DNA, 28 bp, Artificial Sequence
  Synthetic
cagtcatttgggtgtgcaaatccatgca

SEQ ID NO: 7801 - DNA, 28 bp, Artificial Sequence
  Synthetic
cagtcatttgggtaaagtgcttatagtg

SEQ ID NO: 7802 - DNA, 28 bp, Artificial Sequence
  Synthetic
cagtcatttgggttccctttgtcatcct

SEQ ID NO: 7803 - DNA, 28 bp, Artificial Sequence
  Synthetic
cagtcatttgggacagcaggcacagaca

SEQ ID NO: 7804 - DNA, 28 bp, Artificial Sequence
  Synthetic
cagtcatttgggttgtgcttgatctaac

SEQ ID NO: 7805 - DNA, 28 bp, Artificial Sequence
  Synthetic
cagtcatttgggaagctgccagttgaag

SEQ ID NO: 7806 - DNA, 28 bp, Artificial Sequence
  Synthetic
cagtcatttgggtgtcagtttgtcaaat

SEQ ID NO: 7807 - DNA, 28 bp, Artificial Sequence
  Synthetic
cagtcatttgggatcacattgccaggga

SEQ ID NO: 7808 - DNA, 28 bp, Artificial Sequence
  Synthetic
cagtcatttgggttcacagtggctaagt

SEQ ID NO: 7809 - DNA, 28 bp, Artificial Sequence
  Synthetic
cagtcatttgggaaggagctcacagtct

SEQ ID NO: 7810 - DNA, 28 bp, Artificial Sequence
  Synthetic
cagtcatttgggctagcaccatctgaaa

SEQ ID NO: 7811 - DNA, 28 bp, Artificial Sequence
  Synthetic
cagtcatttgggtagcaccatttgaaat

SEQ ID NO: 7812 - DNA, 28 bp, Artificial Sequence
  Synthetic
cagtcatttgggtattgcacattactaa

SEQ ID NO: 7813 - DNA, 28 bp, Artificial Sequence
  Synthetic
cagtcatttgggtggcagtgtcttagct

SEQ ID NO: 7814 - DNA, 28 bp, Artificial Sequence
  Synthetic
cagtcatttgggtggaagactagtgatt

SEQ ID NO: 7815 - DNA, 28 bp, Artificial Sequence
  Synthetic
cagtcatttgggtattgcacttgtcccg

SEQ ID NO: 7816 - DNA, 28 bp, Artificial Sequence
  Synthetic
cagtcatttgggaaagtgctgttcgtgc

SEQ ID NO: 7817 - DNA, 28 bp, Artificial Sequence
  Synthetic
cagtcatttgggttcaacgggtatttat

SEQ ID NO: 7818 - DNA, 28 bp, Artificial Sequence
  Synthetic
cagtcatttgggtttggcactagcacat

SEQ ID NO: 7819 - DNA, 28 bp, Artificial Sequence
  Synthetic
cagtcatttgggtgagatcactatgaaa

SEQ ID NO: 7820 - DNA, 28 bp, Artificial Sequence
  Synthetic
cagtcatttgggtgagatcactgcgaaa

SEQ ID NO: 7821 - DNA, 28 bp, Artificial Sequence
  Synthetic
cagtcatttgggtgagatcattatgaaa

SEQ ID NO: 7822 - DNA, 28 bp, Artificial Sequence
  Synthetic
cagtcatttgggtgaggtagaatgttgg

SEQ ID NO: 7823 - DNA, 28 bp, Artificial Sequence
  Synthetic
cagtcatttgggtgaggtagattgttgg

SEQ ID NO: 7824 - DNA, 28 bp, Artificial Sequence
  Synthetic
cagtcatttgggccattcaactatctgt

SEQ ID NO: 7825 - DNA, 28 bp, Artificial Sequence
  Synthetic
cagtcatttgggtgaggtagtgactcaa

SEQ ID NO: 7826 - DNA, 28 bp, Artificial Sequence
  Synthetic
cagtcatttgggtccctgagaccttcga

SEQ ID NO: 7827 - DNA, 28 bp, Artificial Sequence
  Synthetic
cagtcatttgggaaccctgtagatccga

SEQ ID NO: 7828 - DNA, 28 bp, Artificial Sequence
  Synthetic
cagtcatttgggtcgaatcttcaaggtg

SEQ ID NO: 7829 - DNA, 28 bp, Artificial Sequence
  Synthetic
cagtcatttgggtgagtattctatcagg

SEQ ID NO: 7830 - DNA, 28 bp, Artificial Sequence
  Synthetic
cagtcatttgggtaaggcacgcggtgaa

SEQ ID NO: 7831 - DNA, 28 bp, Artificial Sequence
  Synthetic
cagtcatttgggtaaggcacgcggtgaa

SEQ ID NO: 7832 - DNA, 28 bp, Artificial Sequence
  Synthetic
cagtcatttgggtaaggcacgcggtgaa

SEQ ID NO: 7833 - DNA, 28 bp, Artificial Sequence
  Synthetic
cagtcatttggggcgctcacctcgtgac

SEQ ID NO: 7834 - DNA, 28 bp, Artificial Sequence
  Synthetic
cagtcatttgggtccctgagaccattga

SEQ ID NO: 7835 - DNA, 28 bp, Artificial Sequence
  Synthetic
cagtcatttggggtagtttttggtatca

SEQ ID NO: 7836 - DNA, 28 bp, Artificial Sequence
  Synthetic
cagtcatttgggtccctgagatcataat

SEQ ID NO: 7837 - DNA, 28 bp, Artificial Sequence
  Synthetic
cagtcatttgggtatcacagtcatgcta

SEQ ID NO: 7838 - DNA, 28 bp, Artificial Sequence
  Synthetic
cagtcatttgggttggtccccatcaacc

SEQ ID NO: 7839 - DNA, 28 bp, Artificial Sequence
  Synthetic
cagtcatttggggacggaggtttgctaa

SEQ ID NO: 7840 - DNA, 28 bp, Artificial Sequence
  Synthetic
cagtcatttgggagatatgtttggttaa

SEQ ID NO: 7841 - DNA, 28 bp, Artificial Sequence
  Synthetic
cagtcatttgggaccactgaccgagcat

SEQ ID NO: 7842 - DNA, 28 bp, Artificial Sequence
  Synthetic
cagtcatttgggtgatatgtttggttta

SEQ ID NO: 7843 - DNA, 28 bp, Artificial Sequence
  Synthetic
cagtcatttgggaccattagcctaatgt

SEQ ID NO: 7844 - DNA, 28 bp, Artificial Sequence
  Synthetic
cagtcatttgggtggaatgtcgagaaat

SEQ ID NO: 7845 - DNA, 28 bp, Artificial Sequence
  Synthetic
cagtcatttgggtggaatgtcgtgaatt

SEQ ID NO: 7846 - DNA, 28 bp, Artificial Sequence
  Synthetic
cagtcatttgggtggaatgttgtgaata

SEQ ID NO: 7847 - DNA, 28 bp, Artificial Sequence
  Synthetic
cagtcatttgggtgattgtccatacgca

SEQ ID NO: 7848 - DNA, 28 bp, Artificial Sequence
  Synthetic
cagtcatttgggtaaatgcactatcgga

SEQ ID NO: 7849 - DNA, 28 bp, Artificial Sequence
  Synthetic
cagtcatttgggaaaatgcattatctgg

SEQ ID NO: 7850 - DNA, 28 bp, Artificial Sequence
  Synthetic
cagtcatttgggttgatcagaaatgcag

SEQ ID NO: 7851 - DNA, 28 bp, Artificial Sequence
  Synthetic
cagtcatttgggtaaatgcattatctgg

SEQ ID NO: 7852 - DNA, 28 bp, Artificial Sequence
  Synthetic
cagtcatttgggtaaatgcatttatctg

SEQ ID NO: 7853 - DNA, 28 bp, Artificial Sequence
  Synthetic
cagtcatttgggtcggtgggagtaacat

SEQ ID NO: 7854 - DNA, 28 bp, Artificial Sequence
  Synthetic
cagtcatttgggtgtcatggatatgctc

SEQ ID NO: 7855 - DNA, 28 bp, Artificial Sequence
  Synthetic
cagtcatttgggtgaagagctattcatg

SEQ ID NO: 7856 - DNA, 28 bp, Artificial Sequence
  Synthetic
cagtcatttgggtatcacagccccgctt

SEQ ID NO: 7857 - DNA, 28 bp, Artificial Sequence
  Synthetic
cagtcatttggggttctacggtgttgtg

SEQ ID NO: 7858 - DNA, 28 bp, Artificial Sequence
  Synthetic
cagtcatttgggtcacagccaattttga

SEQ ID NO: 7859 - DNA, 28 bp, Artificial Sequence
  Synthetic
cagtcatttgggtcatcattgttggttg

SEQ ID NO: 7860 - DNA, 28 bp, Artificial Sequence
  Synthetic
cagtcatttgggtcacagccaaaactga

SEQ ID NO: 7861 - DNA, 28 bp, Artificial Sequence
  Synthetic
cagtcatttgggtcacagccaaatttga

SEQ ID NO: 7862 - DNA, 28 bp, Artificial Sequence
  Synthetic
cagtcatttgggaggcaagatgttggca

SEQ ID NO: 7863 - DNA, 28 bp, Artificial Sequence
  Synthetic
cagtcatttgggaggcaagatgctggca

SEQ ID NO: 7864 - DNA, 28 bp, Artificial Sequence
  Synthetic
cagtcatttgggtcaccgggtagacatt

SEQ ID NO: 7865 - DNA, 28 bp, Artificial Sequence
  Synthetic
cagtcatttgggtgatgcatgctacttg

SEQ ID NO: 7866 - DNA, 28 bp, Artificial Sequence
  Synthetic
cagtcatttgggtgactagaaagttcac

SEQ ID NO: 7867 - DNA, 28 bp, Artificial Sequence
  Synthetic
cagtcatttgggtcacaacctccatgaa

SEQ ID NO: 7868 - DNA, 28 bp, Artificial Sequence
  Synthetic
cagtcatttgggtgaaagacacgggtag

SEQ ID NO: 7869 - DNA, 28 bp, Artificial Sequence
  Synthetic
cagtcatttgggtgaaagacacaggtag

SEQ ID NO: 7870 - DNA, 28 bp, Artificial Sequence
  Synthetic
cagtcatttgggtccttctaatgtgttt

SEQ ID NO: 7871 - DNA, 28 bp, Artificial Sequence
  Synthetic
cagtcatttgggtgaaagacatgggtag

SEQ ID NO: 7872 - DNA, 28 bp, Artificial Sequence
  Synthetic
cagtcatttgggtgctgcctggttaaga

SEQ ID NO: 7873 - DNA, 28 bp, Artificial Sequence
  Synthetic
cagtcatttgggtagcaccagggtatat

SEQ ID NO: 7874 - DNA, 28 bp, Artificial Sequence
  Synthetic
cagtcatttgggtaatctcatctggtaa

SEQ ID NO: 7875 - DNA, 28 bp, Artificial Sequence
  Synthetic
cagtcatttgggtggacggaagtgtaat

SEQ ID NO: 7876 - DNA, 28 bp, Artificial Sequence
  Synthetic
cagtcatttggggctgggatgagcctcg

SEQ ID NO: 7877 - DNA, 28 bp, Artificial Sequence
  Synthetic
cagtcatttgggtcagatctaactcttc

SEQ ID NO: 7878 - DNA, 28 bp, Artificial Sequence
  Synthetic
cagtcatttgggcatgtttgaatggcca

SEQ ID NO: 7879 - DNA, 28 bp, Artificial Sequence
  Synthetic
cagtcatttgggagtcagcattggtggt

SEQ ID NO: 7880 - DNA, 28 bp, Artificial Sequence
  Synthetic
cagtcatttggggagcttggattgtgat

SEQ ID NO: 7881 - DNA, 28 bp, Artificial Sequence
  Synthetic
cagtcatttggggttgcttggggttatt

SEQ ID NO: 7882 - DNA, 28 bp, Artificial Sequence
  Synthetic
cagtcatttgggtggagctattgtattt

SEQ ID NO: 7883 - DNA, 28 bp, Artificial Sequence
  Synthetic
cagtcatttgggcgatatgtggtaattt

SEQ ID NO: 7884 - DNA, 28 bp, Artificial Sequence
  Synthetic
cagtcatttggggtaaagctaaattacc

SEQ ID NO: 7885 - DNA, 28 bp, Artificial Sequence
  Synthetic
cagtcatttgggtggaagactattgatt

SEQ ID NO: 7886 - DNA, 28 bp, Artificial Sequence
  Synthetic
cagtcatttgggtggaagactgtcgatt

SEQ ID NO: 7887 - DNA, 28 bp, Artificial Sequence
  Synthetic
cagtcatttgggtggaagactgatgatt

SEQ ID NO: 7888 - DNA, 28 bp, Artificial Sequence
  Synthetic
cagtcatttgggtaatactgtcaggtaa

SEQ ID NO: 7889 - DNA, 28 bp, Artificial Sequence
  Synthetic
cagtcatttgggtgagcaaagtttcaag

SEQ ID NO: 7890 - DNA, 28 bp, Artificial Sequence
  Synthetic
cagtcatttggggtgagcaaagcttcaa

SEQ ID NO: 7891 - DNA, 28 bp, Artificial Sequence
  Synthetic
cagtcatttggggattgcactagttaat

SEQ ID NO: 7892 - DNA, 28 bp, Artificial Sequence
  Synthetic
cagtcatttgggtgacagaagagagtga

SEQ ID NO: 7893 - DNA, 28 bp, Artificial Sequence
  Synthetic
cagtcatttgggtttggattgaagggag

SEQ ID NO: 7894 - DNA, 28 bp, Artificial Sequence
  Synthetic
cagtcatttgggtttggattgaagggag

SEQ ID NO: 7895 - DNA, 28 bp, Artificial Sequence
  Synthetic
cagtcatttgggcttggattgaagggag

SEQ ID NO: 7896 - DNA, 28 bp, Artificial Sequence
  Synthetic
cagtcatttgggtttggattgaagggag

SEQ ID NO: 7897 - DNA, 28 bp, Artificial Sequence
  Synthetic
cagtcatttgggtttggattgaaaggag

SEQ ID NO: 7898 - DNA, 28 bp, Artificial Sequence
  Synthetic
cagtcatttgggtgaagctgccagcatg

SEQ ID NO: 7899 - DNA, 28 bp, Artificial Sequence
  Synthetic
cagtcatttgggtgaagctgccagcatg

SEQ ID NO: 7900 - DNA, 28 bp, Artificial Sequence
  Synthetic
cagtcatttgggtcgcttggtgcagatc

SEQ ID NO: 7901 - DNA, 28 bp, Artificial Sequence
  Synthetic
cagtcatttgggtcgcttgggcagatcg

SEQ ID NO: 7902 - DNA, 28 bp, Artificial Sequence
  Synthetic
cagtcatttgggttccacagctttcttg

SEQ ID NO: 7903 - DNA, 28 bp, Artificial Sequence
  Synthetic
cagtcatttgggctgcactgcctcttcc

SEQ ID NO: 7904 - DNA, 28 bp, Artificial Sequence
  Synthetic
cagtcatttgggctgcactgcctcttcc

SEQ ID NO: 7905 - DNA, 28 bp, Artificial Sequence
  Synthetic
cagtcatttgggctgcactgcctcttcc

SEQ ID NO: 7906 - DNA, 28 bp, Artificial Sequence
  Synthetic
cagtcatttgggctgcactgcctcttcc

SEQ ID NO: 7907 - DNA, 28 bp, Artificial Sequence
  Synthetic
cagtcatttgggctgcactgactcttcc

SEQ ID NO: 7908 - DNA, 28 bp, Artificial Sequence
  Synthetic
cagtcatttgggtgaggtagtaggttgt

SEQ ID NO: 7909 - DNA, 28 bp, Artificial Sequence
  Synthetic
cagtcatttgggtgaggtagtagattgt

SEQ ID NO: 7910 - DNA, 28 bp, Artificial Sequence
  Synthetic
cagtcatttgggtgaggtagtagtttgt

SEQ ID NO: 7911 - DNA, 28 bp, Artificial Sequence
  Synthetic
cagtcatttgggagcagcattgtacagg

SEQ ID NO: 7912 - DNA, 28 bp, Artificial Sequence
  Synthetic
cagtcatttgggtcaaatgctcagactc

SEQ ID NO: 7913 - DNA, 28 bp, Artificial Sequence
  Synthetic
cagtcatttgggtcaaatgctcagactc

SEQ ID NO: 7914 - DNA, 28 bp, Artificial Sequence
  Synthetic
cagtcatttgggaaaagtgcttacagtg

SEQ ID NO: 7915 - DNA, 28 bp, Artificial Sequence
  Synthetic
cagtcatttgggagcagcattgtacagg

SEQ ID NO: 7916 - DNA, 28 bp, Artificial Sequence
  Synthetic
cagtcatttgggtggagtgtgacaatgg

SEQ ID NO: 7917 - DNA, 28 bp, Artificial Sequence
  Synthetic
cagtcatttgggttaaggcacgcggtga

SEQ ID NO: 7918 - DNA, 28 bp, Artificial Sequence
  Synthetic
cagtcatttgggtccctgagaccctaac

SEQ ID NO: 7919 - DNA, 28 bp, Artificial Sequence
  Synthetic
cagtcatttgggtcacagtgaaccggtc

SEQ ID NO: 7920 - DNA, 28 bp, Artificial Sequence
  Synthetic
cagtcatttgggtatggctttttattcc

SEQ ID NO: 7921 - DNA, 28 bp, Artificial Sequence
  Synthetic
cagtcatttgggactccatttgttttga

SEQ ID NO: 7922 - DNA, 28 bp, Artificial Sequence
  Synthetic
cagtcatttgggtctacagtgcacgtgt

SEQ ID NO: 7923 - DNA, 28 bp, Artificial Sequence
  Synthetic
cagtcatttgggagtggttttaccctat

SEQ ID NO: 7924 - DNA, 28 bp, Artificial Sequence
  Synthetic
cagtcatttggggtccagttttcccagg

SEQ ID NO: 7925 - DNA, 28 bp, Artificial Sequence
  Synthetic
cagtcatttgggtcagtgcactacagaa

SEQ ID NO: 7926 - DNA, 28 bp, Artificial Sequence
  Synthetic
cagtcatttgggttgcatagtcacaaaa

SEQ ID NO: 7927 - DNA, 28 bp, Artificial Sequence
  Synthetic
cagtcatttgggccgcagcacatcatgg

SEQ ID NO: 7928 - DNA, 28 bp, Artificial Sequence
  Synthetic
cagtcatttgggtaaggtgcatctagtg

SEQ ID NO: 7929 - DNA, 28 bp, Artificial Sequence
  Synthetic
cagtcatttgggaacattcattgctgtc

SEQ ID NO: 7930 - DNA, 28 bp, Artificial Sequence
  Synthetic
cagtcatttgggaacattcaacctgtcg

SEQ ID NO: 7931 - DNA, 28 bp, Artificial Sequence
  Synthetic
cagtcatttgggtatggcactggtagaa

SEQ ID NO: 7932 - DNA, 28 bp, Artificial Sequence
  Synthetic
cagtcatttgggtggacggagaactgat

SEQ ID NO: 7933 - DNA, 28 bp, Artificial Sequence
  Synthetic
cagtcatttgggcaaagaattctccttt

SEQ ID NO: 7934 - DNA, 28 bp, Artificial Sequence
  Synthetic
cagtcatttgggtaggtagtttcatgtt

SEQ ID NO: 7935 - DNA, 28 bp, Artificial Sequence
  Synthetic
cagtcatttgggtgtgcaaatctatgca

SEQ ID NO: 7936 - DNA, 28 bp, Artificial Sequence
  Synthetic
cagtcatttgggtaaagtgcttatagtg

SEQ ID NO: 7937 - DNA, 28 bp, Artificial Sequence
  Synthetic
cagtcatttgggttccctttgtcatcct

SEQ ID NO: 7938 - DNA, 28 bp, Artificial Sequence
  Synthetic
cagtcatttgggtccttcattccaccgg

SEQ ID NO: 7939 - DNA, 28 bp, Artificial Sequence
  Synthetic
cagtcatttgggtagcttatcagactga

SEQ ID NO: 7940 - DNA, 28 bp, Artificial Sequence
  Synthetic
cagtcatttgggacagcaggcacagaca

SEQ ID NO: 7941 - DNA, 28 bp, Artificial Sequence
  Synthetic
cagtcatttgggtaatctcagctggcaa

SEQ ID NO: 7942 - DNA, 28 bp, Artificial Sequence
  Synthetic
cagtcatttgggtactgcatcaggaact

SEQ ID NO: 7943 - DNA, 28 bp, Artificial Sequence
  Synthetic
cagtcatttgggcaagtcactagtggtt

SEQ ID NO: 7944 - DNA, 28 bp, Artificial Sequence
  Synthetic
cagtcatttgggatcacattgccaggga

SEQ ID NO: 7945 - DNA, 28 bp, Artificial Sequence
  Synthetic
cagtcatttgggtggctcagttcagcag

SEQ ID NO: 7946 - DNA, 28 bp, Artificial Sequence
  Synthetic
cagtcatttgggttcaagtaatccagga

SEQ ID NO: 7947 - DNA, 28 bp, Artificial Sequence
  Synthetic
cagtcatttgggttcacagtggctaagt

SEQ ID NO: 7948 - DNA, 28 bp, Artificial Sequence
  Synthetic
cagtcatttgggaaggagctcacactct

SEQ ID NO: 7949 - DNA, 28 bp, Artificial Sequence
  Synthetic
cagtcatttgggtagcaccatttgaaat

SEQ ID NO: 7950 - DNA, 28 bp, Artificial Sequence
  Synthetic
cagtcatttgggtagcaccatttgaaat

SEQ ID NO: 7951 - DNA, 28 bp, Artificial Sequence
  Synthetic
cagtcatttgggcagtccaatagtattg

SEQ ID NO: 7952 - DNA, 28 bp, Artificial Sequence
  Synthetic
cagtcatttgggtgtaaacatcctacac

SEQ ID NO: 7953 - DNA, 28 bp, Artificial Sequence
  Synthetic
cagtcatttgggtattgcacattactaa

SEQ ID NO: 7954 - DNA, 28 bp, Artificial Sequence
  Synthetic
cagtcatttggggcacattacacggtcg

SEQ ID NO: 7955 - DNA, 28 bp, Artificial Sequence
  Synthetic
cagtcatttgggcctagtaggtgttcag

SEQ ID NO: 7956 - DNA, 28 bp, Artificial Sequence
  Synthetic
cagtcatttgggcctctgggcccttcct

SEQ ID NO: 7957 - DNA, 28 bp, Artificial Sequence
  Synthetic
cagtcatttgggtggaagactagtgatt

SEQ ID NO: 7958 - DNA, 28 bp, Artificial Sequence
  Synthetic
cagtcatttgggtctttggttatctagc

SEQ ID NO: 7959 - DNA, 28 bp, Artificial Sequence
  Synthetic
cagtcatttgggtctttggttatctagc

SEQ ID NO: 7960 - DNA, 28 bp, Artificial Sequence
  Synthetic
cagtcatttgggttcaacgggtatttat

SEQ ID NO: 7961 - DNA, 28 bp, Artificial Sequence
  Synthetic
cagtcatttggggcctgtttcatgccct

SEQ ID NO: 7962 - DNA, 28 bp, Artificial Sequence
  Synthetic
cagtcatttgggtgaggggcctgaaatg

SEQ ID NO: 7963 - DNA, 28 bp, Artificial Sequence
  Synthetic
cagtcatttgggtgaggtagtaggttgt

SEQ ID NO: 7964 - DNA, 28 bp, Artificial Sequence
  Synthetic
cagtcatttgggtgaggtagtaggttgt

SEQ ID NO: 7965 - DNA, 28 bp, Artificial Sequence
  Synthetic
cagtcatttgggtgaggtagttggttgt

SEQ ID NO: 7966 - DNA, 28 bp, Artificial Sequence
  Synthetic
cagtcatttgggtgaggtagtagattga

SEQ ID NO: 7967 - DNA, 28 bp, Artificial Sequence
  Synthetic
cagtcatttgggtgaggtagtagtttgt

SEQ ID NO: 7968 - DNA, 28 bp, Artificial Sequence
  Synthetic
cagtcatttgggtgaggtagtaagttgt

SEQ ID NO: 7969 - DNA, 28 bp, Artificial Sequence
  Synthetic
cagtcatttgggtgaggtagtagtttgt

SEQ ID NO: 7970 - DNA, 28 bp, Artificial Sequence
  Synthetic
cagtcatttgggtgaggtagttttttgt

SEQ ID NO: 7971 - DNA, 28 bp, Artificial Sequence
  Synthetic
cagtcatttgggtggaatgtaaagaagt

SEQ ID NO: 7972 - DNA, 28 bp, Artificial Sequence
  Synthetic
cagtcatttgggaacccgtagatccgaa

SEQ ID NO: 7973 - DNA, 28 bp, Artificial Sequence
  Synthetic
cagtcatttgggtacagtactgtgataa

SEQ ID NO: 7974 - DNA, 28 bp, Artificial Sequence
  Synthetic
cagtcatttgggtacagtactatgataa

SEQ ID NO: 7975 - DNA, 28 bp, Artificial Sequence
  Synthetic
cagtcatttgggagcagcattgtacagg

SEQ ID NO: 7976 - DNA, 28 bp, Artificial Sequence
  Synthetic
cagtcatttgggagcagcattgtacagg

SEQ ID NO: 7977 - DNA, 28 bp, Artificial Sequence
  Synthetic
cagtcatttgggtaccctgtagaaccga

SEQ ID NO: 7978 - DNA, 28 bp, Artificial Sequence
  Synthetic
cagtcatttgggtaccctgtagatccgg

SEQ ID NO: 7979 - DNA, 28 bp, Artificial Sequence
  Synthetic
cagtcatttgggtaccctgtagaaccga

SEQ ID NO: 7980 - DNA, 28 bp, Artificial Sequence
  Synthetic
cagtcatttgggtggagtgtgacaatgg

SEQ ID NO: 7981 - DNA, 28 bp, Artificial Sequence
  Synthetic
cagtcatttgggtaaggcacgcggtgaa

SEQ ID NO: 7982 - DNA, 28 bp, Artificial Sequence
  Synthetic
cagtcatttgggtccctgagacccttaa

SEQ ID NO: 7983 - DNA, 28 bp, Artificial Sequence
  Synthetic
cagtcatttgggtccctgagaccctaac

SEQ ID NO: 7984 - DNA, 28 bp, Artificial Sequence
  Synthetic
cagtcatttgggtcgtaccgtgagtaat

SEQ ID NO: 7985 - DNA, 28 bp, Artificial Sequence
  Synthetic
cagtcatttgggtcacagtgaaccggtc

SEQ ID NO: 7986 - DNA, 28 bp, Artificial Sequence
  Synthetic
cagtcatttgggctttttgcggtctggg

SEQ ID NO: 7987 - DNA, 28 bp, Artificial Sequence
  Synthetic
cagtcatttgggcagtgcaatattaaaa

SEQ ID NO: 7988 - DNA, 28 bp, Artificial Sequence
  Synthetic
cagtcatttgggtaacagtctacagcca

SEQ ID NO: 7989 - DNA, 28 bp, Artificial Sequence
  Synthetic
cagtcatttgggtttggtccccttcaac

SEQ ID NO: 7990 - DNA, 28 bp, Artificial Sequence
  Synthetic
cagtcatttgggtatggctttctattcc

SEQ ID NO: 7991 - DNA, 28 bp, Artificial Sequence
  Synthetic
cagtcatttgggtatggctttttattcc

SEQ ID NO: 7992 - DNA, 28 bp, Artificial Sequence
  Synthetic
cagtcatttgggttattgcttgagaata

SEQ ID NO: 7993 - DNA, 28 bp, Artificial Sequence
  Synthetic
cagtcatttgggagctggtgttgtgaat

SEQ ID NO: 7994 - DNA, 28 bp, Artificial Sequence
  Synthetic
cagtcatttgggcagtggttttacccta

SEQ ID NO: 7995 - DNA, 28 bp, Artificial Sequence
  Synthetic
cagtcatttgggcataaagtagaaagca

SEQ ID NO: 7996 - DNA, 28 bp, Artificial Sequence
  Synthetic
cagtcatttgggcataaagtagaaagca

SEQ ID NO: 7997 - DNA, 28 bp, Artificial Sequence
  Synthetic
cagtcatttgggtacagtatagatgatg

SEQ ID NO: 7998 - DNA, 28 bp, Artificial Sequence
  Synthetic
cagtcatttgggtcagtgcattacagaa

SEQ ID NO: 7999 - DNA, 28 bp, Artificial Sequence
  Synthetic
cagtcatttgggtcagtgcataacagaa

SEQ ID NO: 8000 - DNA, 28 bp, Artificial Sequence
  Synthetic
cagtcatttgggttgcatagtcacaaaa

SEQ ID NO: 8001 - DNA, 28 bp, Artificial Sequence
  Synthetic
cagtcatttgggttgcatagtcacaaaa

SEQ ID NO: 8002 - DNA, 28 bp, Artificial Sequence
  Synthetic
cagtcatttgggtagcagcacggaatgg

SEQ ID NO: 8003 - DNA, 28 bp, Artificial Sequence
  Synthetic
cagtcatttgggtagcagcgcatcatgg

SEQ ID NO: 8004 - DNA, 28 bp, Artificial Sequence
  Synthetic
cagtcatttgggtagcagcacgtaaata

SEQ ID NO: 8005 - DNA, 28 bp, Artificial Sequence
  Synthetic
cagtcatttgggcaaagtgcttacagtg

SEQ ID NO: 8006 - DNA, 28 bp, Artificial Sequence
  Synthetic
cagtcatttgggtaaggtgcatctagtg

SEQ ID NO: 8007 - DNA, 28 bp, Artificial Sequence
  Synthetic
cagtcatttgggaacattcaacgctgtc

SEQ ID NO: 8008 - DNA, 28 bp, Artificial Sequence
  Synthetic
cagtcatttgggaccatcgaccgttgat

SEQ ID NO: 8009 - DNA, 28 bp, Artificial Sequence
  Synthetic
cagtcatttgggaacattcattgctgtc

SEQ ID NO: 8010 - DNA, 28 bp, Artificial Sequence
  Synthetic
cagtcatttgggtggttctagacttgcc

SEQ ID NO: 8011 - DNA, 28 bp, Artificial Sequence
  Synthetic
cagtcatttgggtatggcactggtagaa

SEQ ID NO: 8012 - DNA, 28 bp, Artificial Sequence
  Synthetic
cagtcatttgggtggacggagaactgat

SEQ ID NO: 8013 - DNA, 28 bp, Artificial Sequence
  Synthetic
cagtcatttgggtcgtgtcttgtgttgc

SEQ ID NO: 8014 - DNA, 28 bp, Artificial Sequence
  Synthetic
cagtcatttgggtgatatgtttgatata

SEQ ID NO: 8015 - DNA, 28 bp, Artificial Sequence
  Synthetic
cagtcatttgggatgacctatgaattga

SEQ ID NO: 8016 - DNA, 28 bp, Artificial Sequence
  Synthetic
cagtcatttgggaactggcctacaaagt

SEQ ID NO: 8017 - DNA, 28 bp, Artificial Sequence
  Synthetic
cagtcatttgggtgtaacagcaactcca

SEQ ID NO: 8018 - DNA, 28 bp, Artificial Sequence
  Synthetic
cagtcatttgggtaggtagtttcatgtt

SEQ ID NO: 8019 - DNA, 28 bp, Artificial Sequence
  Synthetic
cagtcatttgggtaggtagtttcaagtt

SEQ ID NO: 8020 - DNA, 28 bp, Artificial Sequence
  Synthetic
cagtcatttgggcccagtgttcagacta

SEQ ID NO: 8021 - DNA, 28 bp, Artificial Sequence
  Synthetic
cagtcatttgggtgtgcaaatctatgca

SEQ ID NO: 8022 - DNA, 28 bp, Artificial Sequence
  Synthetic
cagtcatttgggtgtgcaaatccatgca

SEQ ID NO: 8023 - DNA, 28 bp, Artificial Sequence
  Synthetic
cagtcatttgggtaaagtgcttatagtg

SEQ ID NO: 8024 - DNA, 28 bp, Artificial Sequence
  Synthetic
cagtcatttgggtaacactgtctggtaa

SEQ ID NO: 8025 - DNA, 28 bp, Artificial Sequence
  Synthetic
cagtcatttgggtaatactgcctggtaa

SEQ ID NO: 8026 - DNA, 28 bp, Artificial Sequence
  Synthetic
cagtcatttgggagaggcatagggcatg

SEQ ID NO: 8027 - DNA, 28 bp, Artificial Sequence
  Synthetic
cagtcatttggggtgaaatgtttaggac

SEQ ID NO: 8028 - DNA, 28 bp, Artificial Sequence
  Synthetic
cagtcatttgggttccctttgtcatcct

SEQ ID NO: 8029 - DNA, 28 bp, Artificial Sequence
  Synthetic
cagtcatttgggttccctttgttatcct

SEQ ID NO: 8030 - DNA, 28 bp, Artificial Sequence
  Synthetic
cagtcatttgggtccttcattccaccgg

SEQ ID NO: 8031 - DNA, 28 bp, Artificial Sequence
  Synthetic
cagtcatttgggtagcttatcagactgg

SEQ ID NO: 8032 - DNA, 28 bp, Artificial Sequence
  Synthetic
cagtcatttgggctgtgcgtgtgacagc

SEQ ID NO: 8033 - DNA, 28 bp, Artificial Sequence
  Synthetic
cagtcatttgggtaacagtctacagtca

SEQ ID NO: 8034 - DNA, 28 bp, Artificial Sequence
  Synthetic
cagtcatttgggacagcaggcacagaca

SEQ ID NO: 8035 - DNA, 28 bp, Artificial Sequence
  Synthetic
cagtcatttgggaaatctcagctggcaa

SEQ ID NO: 8036 - DNA, 28 bp, Artificial Sequence
  Synthetic
cagtcatttgggtaatctctgcaggcaa

SEQ ID NO: 8037 - DNA, 28 bp, Artificial Sequence
  Synthetic
cagtcatttgggtactgcatcaggaact

SEQ ID NO: 8038 - DNA, 28 bp, Artificial Sequence
  Synthetic
cagtcatttgggttgtgcttgatctaac

SEQ ID NO: 8039 - DNA, 28 bp, Artificial Sequence
  Synthetic
cagtcatttgggttgtgcttgatctaac

SEQ ID NO: 8040 - DNA, 28 bp, Artificial Sequence
  Synthetic
cagtcatttgggtgattgtccaaacgca

SEQ ID NO: 8041 - DNA, 28 bp, Artificial Sequence
  Synthetic
cagtcatttgggagctacattgtctgct

SEQ ID NO: 8042 - DNA, 28 bp, Artificial Sequence
  Synthetic
cagtcatttgggagctacatctggctac

SEQ ID NO: 8043 - DNA, 28 bp, Artificial Sequence
  Synthetic
cagtcatttgggtgtcagtttgtcaaat

SEQ ID NO: 8044 - DNA, 28 bp, Artificial Sequence
  Synthetic
cagtcatttgggaagctgccagctgaag

SEQ ID NO: 8045 - DNA, 28 bp, Artificial Sequence
  Synthetic
cagtcatttgggaagctgccagttgaag

SEQ ID NO: 8046 - DNA, 28 bp, Artificial Sequence
  Synthetic
cagtcatttgggatcacattgccaggga

SEQ ID NO: 8047 - DNA, 28 bp, Artificial Sequence
  Synthetic
cagtcatttgggatcacattgccaggga

SEQ ID NO: 8048 - DNA, 28 bp, Artificial Sequence
  Synthetic
cagtcatttgggtggctcagttcagcag

SEQ ID NO: 8049 - DNA, 28 bp, Artificial Sequence
  Synthetic
cagtcatttgggcattgcacttgtctcg

SEQ ID NO: 8050 - DNA, 28 bp, Artificial Sequence
  Synthetic
cagtcatttgggttcaagtaatccagga

SEQ ID NO: 8051 - DNA, 28 bp, Artificial Sequence
  Synthetic
cagtcatttgggttcacagtggctaagt

SEQ ID NO: 8052 - DNA, 28 bp, Artificial Sequence
  Synthetic
cagtcatttgggttcacagtggttaagt

SEQ ID NO: 8053 - DNA, 28 bp, Artificial Sequence
  Synthetic
cagtcatttgggttcacagtggctaagt

SEQ ID NO: 8054 - DNA, 28 bp, Artificial Sequence
  Synthetic
cagtcatttgggtagcaccatttgaaat

SEQ ID NO: 8055 - DNA, 28 bp, Artificial Sequence
  Synthetic
cagtcatttgggtagcaccatttgaaat

SEQ ID NO: 8056 - DNA, 28 bp, Artificial Sequence
  Synthetic
cagtcatttgggcagtgcaatagtattg

SEQ ID NO: 8057 - DNA, 28 bp, Artificial Sequence
  Synthetic
cagtcatttgggtgtaaacatcctacac

SEQ ID NO: 8058 - DNA, 28 bp, Artificial Sequence
  Synthetic
cagtcatttgggtgtaaacatcctacac

SEQ ID NO: 8059 - DNA, 28 bp, Artificial Sequence
  Synthetic
cagtcatttgggtgtaaacatccccgac

SEQ ID NO: 8060 - DNA, 28 bp, Artificial Sequence
  Synthetic
cagtcatttgggtccagcatcagtgatt

SEQ ID NO: 8061 - DNA, 28 bp, Artificial Sequence
  Synthetic
cagtcatttgggtaatgcccctaaaaat

SEQ ID NO: 8062 - DNA, 28 bp, Artificial Sequence
  Synthetic
cagtcatttgggtttgttcgttcggctc

SEQ ID NO: 8063 - DNA, 28 bp, Artificial Sequence
  Synthetic
cagtcatttgggtaatactgtctggtaa

SEQ ID NO: 8064 - DNA, 28 bp, Artificial Sequence
  Synthetic
cagtcatttgggtatgtgcccttggact

SEQ ID NO: 8065 - DNA, 28 bp, Artificial Sequence
  Synthetic
cagtcatttgggatagctctttaaatgg

SEQ ID NO: 8066 - DNA, 28 bp, Artificial Sequence
  Synthetic
cagtcatttgggcacagcgcatacaatg

SEQ ID NO: 8067 - DNA, 28 bp, Artificial Sequence
  Synthetic
cagtcatttgggagtgacatcatatgta

SEQ ID NO: 8068 - DNA, 28 bp, Artificial Sequence
  Synthetic
cagtcatttgggtggaagactagtgatt

SEQ ID NO: 8069 - DNA, 28 bp, Artificial Sequence
  Synthetic
cagtcatttgggtctttggttatctagc

SEQ ID NO: 8070 - DNA, 28 bp, Artificial Sequence
  Synthetic
cagtcatttgggtattgcacttgtcccg

SEQ ID NO: 8071 - DNA, 28 bp, Artificial Sequence
  Synthetic
cagtcatttgggtttggcactagcacat

SEQ ID NO: 8072 - DNA, 28 bp, Artificial Sequence
  Synthetic
cagtcatttgggttggtccccttcaacc

SEQ ID NO: 8073 - DNA, 28 bp, Artificial Sequence
  Synthetic
cagtcatttgggtaaggtgcatctagtg

SEQ ID NO: 8074 - DNA, 28 bp, Artificial Sequence
  Synthetic
cagtcatttgggtgtgcaaatccatgca

SEQ ID NO: 8075 - DNA, 28 bp, Artificial Sequence
  Synthetic
cagtcatttgggcaaagtgctcatagtg

SEQ ID NO: 8076 - DNA, 28 bp, Artificial Sequence
  Synthetic
cagtcatttgggaaagtgctttctgttt

SEQ ID NO: 8077 - DNA, 28 bp, Artificial Sequence
  Synthetic
cagtcatttgggtaagtgctctctagtt

SEQ ID NO: 8078 - DNA, 28 bp, Artificial Sequence
  Synthetic
cagtcatttgggtaatactgtctggtaa

SEQ ID NO: 8079 - DNA, 28 bp, Artificial Sequence
  Synthetic
cagtcatttgggtgaggtagtaggttgt

SEQ ID NO: 8080 - DNA, 28 bp, Artificial Sequence
  Synthetic
cagtcatttgggtgaggtagtagtttgt

SEQ ID NO: 8081 - DNA, 28 bp, Artificial Sequence
  Synthetic
cagtcatttgggtgaggtagtaggttgt

SEQ ID NO: 8082 - DNA, 28 bp, Artificial Sequence
  Synthetic
cagtcatttgggtgaggtagtaggttgt

SEQ ID NO: 8083 - DNA, 28 bp, Artificial Sequence
  Synthetic
cagtcatttgggtgaggtagtagattgt

SEQ ID NO: 8084 - DNA, 28 bp, Artificial Sequence
  Synthetic
cagtcatttgggtgaggtagttgtttgt

SEQ ID NO: 8085 - DNA, 28 bp, Artificial Sequence
  Synthetic
cagtcatttgggtgaggtagtagtttgt

SEQ ID NO: 8086 - DNA, 28 bp, Artificial Sequence
  Synthetic
cagtcatttgggaacccgtagatccgaa

SEQ ID NO: 8087 - DNA, 28 bp, Artificial Sequence
  Synthetic
cagtcatttgggtacagtactgtgataa

SEQ ID NO: 8088 - DNA, 28 bp, Artificial Sequence
  Synthetic
cagtcatttgggagcagcattgtacagg

SEQ ID NO: 8089 - DNA, 28 bp, Artificial Sequence
  Synthetic
cagtcatttgggaaaagtgcttatagtg

SEQ ID NO: 8090 - DNA, 28 bp, Artificial Sequence
  Synthetic
cagtcatttgggagcagcattgtacagg

SEQ ID NO: 8091 - DNA, 28 bp, Artificial Sequence
  Synthetic
cagtcatttgggtaccctgtagatccga

SEQ ID NO: 8092 - DNA, 28 bp, Artificial Sequence
  Synthetic
cagtcatttgggtaccctgtagaaccga

SEQ ID NO: 8093 - DNA, 28 bp, Artificial Sequence
  Synthetic
cagtcatttgggcaccctgtagaatcga

SEQ ID NO: 8094 - DNA, 28 bp, Artificial Sequence
  Synthetic
cagtcatttgggtggagtgtgacaatgg

SEQ ID NO: 8095 - DNA, 28 bp, Artificial Sequence
  Synthetic
cagtcatttgggttaaggcacgcggtga

SEQ ID NO: 8096 - DNA, 28 bp, Artificial Sequence
  Synthetic
cagtcatttgggtccctgagacccttaa

SEQ ID NO: 8097 - DNA, 28 bp, Artificial Sequence
  Synthetic
cagtcatttgggtccctgagaccctaac

SEQ ID NO: 8098 - DNA, 28 bp, Artificial Sequence
  Synthetic
cagtcatttgggtcgtaccgtgagtaat

SEQ ID NO: 8099 - DNA, 28 bp, Artificial Sequence
  Synthetic
cagtcatttgggcattattacttttggt

SEQ ID NO: 8100 - DNA, 28 bp, Artificial Sequence
  Synthetic
cagtcatttgggtcacagtgaaccggtc

SEQ ID NO: 8101 - DNA, 28 bp, Artificial Sequence
  Synthetic
cagtcatttgggctttttgcggtctggg

SEQ ID NO: 8102 - DNA, 28 bp, Artificial Sequence
  Synthetic
cagtcatttgggcagtgcaatgttaaaa

SEQ ID NO: 8103 - DNA, 28 bp, Artificial Sequence
  Synthetic
cagtcatttgggcagtgcaatgatgaaa

SEQ ID NO: 8104 - DNA, 28 bp, Artificial Sequence
  Synthetic
cagtcatttgggcagtgcaatattaaaa

SEQ ID NO: 8105 - DNA, 28 bp, Artificial Sequence
  Synthetic
cagtcatttgggtaacagtctacagcca

SEQ ID NO: 8106 - DNA, 28 bp, Artificial Sequence
  Synthetic
cagtcatttgggttggtccccttcaacc

SEQ ID NO: 8107 - DNA, 28 bp, Artificial Sequence
  Synthetic
cagtcatttgggttggtccccttcaacc

SEQ ID NO: 8108 - DNA, 28 bp, Artificial Sequence
  Synthetic
cagtcatttgggttggtccccttcaacc

SEQ ID NO: 8109 - DNA, 28 bp, Artificial Sequence
  Synthetic
cagtcatttgggttggtccccttcaacc

SEQ ID NO: 8110 - DNA, 28 bp, Artificial Sequence
  Synthetic
cagtcatttgggtatggctttttattcc

SEQ ID NO: 8111 - DNA, 28 bp, Artificial Sequence
  Synthetic
cagtcatttgggtattgcttaagaatac

SEQ ID NO: 8112 - DNA, 28 bp, Artificial Sequence
  Synthetic
cagtcatttgggagctggtgttgtgaat

SEQ ID NO: 8113 - DNA, 28 bp, Artificial Sequence
  Synthetic
cagtcatttgggtctacagtgcatgtgt

SEQ ID NO: 8114 - DNA, 28 bp, Artificial Sequence
  Synthetic
cagtcatttgggagtggttttaccctat

SEQ ID NO: 8115 - DNA, 28 bp, Artificial Sequence
  Synthetic
cagtcatttgggtgtagtgtttcctact

SEQ ID NO: 8116 - DNA, 28 bp, Artificial Sequence
  Synthetic
cagtcatttgggcataaagtagaaagca

SEQ ID NO: 8117 - DNA, 28 bp, Artificial Sequence
  Synthetic
cagtcatttgggtgagatgaagcactgt

SEQ ID NO: 8118 - DNA, 28 bp, Artificial Sequence
  Synthetic
cagtcatttgggtacagtatagatgatg

SEQ ID NO: 8119 - DNA, 28 bp, Artificial Sequence
  Synthetic
cagtcatttggggtccagttttcccagg

SEQ ID NO: 8120 - DNA, 28 bp, Artificial Sequence
  Synthetic
cagtcatttgggtgagaactgaattcca

SEQ ID NO: 8121 - DNA, 28 bp, Artificial Sequence
  Synthetic
cagtcatttgggtcagtgcactacagaa

SEQ ID NO: 8122 - DNA, 28 bp, Artificial Sequence
  Synthetic
cagtcatttgggtcagtgcatcacagaa

SEQ ID NO: 8123 - DNA, 28 bp, Artificial Sequence
  Synthetic
cagtcatttgggtctcccaacccttgta

SEQ ID NO: 8124 - DNA, 28 bp, Artificial Sequence
  Synthetic
cagtcatttgggttgcatagtcacaaaa

SEQ ID NO: 8125 - DNA, 28 bp, Artificial Sequence
  Synthetic
cagtcatttgggttaatgctaatcgtga

SEQ ID NO: 8126 - DNA, 28 bp, Artificial Sequence
  Synthetic
cagtcatttgggtagcagcacataatgg

SEQ ID NO: 8127 - DNA, 28 bp, Artificial Sequence
  Synthetic
cagtcatttgggtagcagcacatcatga

SEQ ID NO: 8128 - DNA, 28 bp, Artificial Sequence
  Synthetic
cagtcatttgggtagcagcacatcatgg

SEQ ID NO: 8129 - DNA, 28 bp, Artificial Sequence
  Synthetic
cagtcatttgggtagcagcacgtaaata

SEQ ID NO: 8130 - DNA, 28 bp, Artificial Sequence
  Synthetic
cagtcatttgggtagcagcacgtaaata

SEQ ID NO: 8131 - DNA, 28 bp, Artificial Sequence
  Synthetic
cagtcatttgggtagcagcacgtaaata

SEQ ID NO: 8132 - DNA, 28 bp, Artificial Sequence
  Synthetic
cagtcatttgggactgcagtgaaggcac

SEQ ID NO: 8133 - DNA, 28 bp, Artificial Sequence
  Synthetic
cagtcatttgggcaaagtgcttacagtg

SEQ ID NO: 8134 - DNA, 28 bp, Artificial Sequence
  Synthetic
cagtcatttgggaacattcaacgctgtc

SEQ ID NO: 8135 - DNA, 28 bp, Artificial Sequence
  Synthetic
cagtcatttgggaccatcgatcgttgac

SEQ ID NO: 8136 - DNA, 28 bp, Artificial Sequence
  Synthetic
cagtcatttgggaacattcattgctgtc

SEQ ID NO: 8137 - DNA, 28 bp, Artificial Sequence
  Synthetic
cagtcatttgggtttggcaatggtagaa

SEQ ID NO: 8138 - DNA, 28 bp, Artificial Sequence
  Synthetic
cagtcatttgggtggttctagacttgcc

SEQ ID NO: 8139 - DNA, 28 bp, Artificial Sequence
  Synthetic
cagtcatttgggtatggcactggtagaa

SEQ ID NO: 8140 - DNA, 28 bp, Artificial Sequence
  Synthetic
cagtcatttgggtggacggagaactgat

SEQ ID NO: 8141 - DNA, 28 bp, Artificial Sequence
  Synthetic
cagtcatttgggtcgtgtcttgtgttgc

SEQ ID NO: 8142 - DNA, 28 bp, Artificial Sequence
  Synthetic
cagtcatttggggtgcctactgaactga

SEQ ID NO: 8143 - DNA, 28 bp, Artificial Sequence
  Synthetic
cagtcatttgggtaaggtgcatctagtg

SEQ ID NO: 8144 - DNA, 28 bp, Artificial Sequence
  Synthetic
cagtcatttgggtaaggtgcatctagtg

SEQ ID NO: 8145 - DNA, 28 bp, Artificial Sequence
  Synthetic
cagtcatttgggcaacggaatcccaaaa

SEQ ID NO: 8146 - DNA, 28 bp, Artificial Sequence
  Synthetic
cagtcatttgggatgacctatgaattga

SEQ ID NO: 8147 - DNA, 28 bp, Artificial Sequence
  Synthetic
cagtcatttgggaactggcccgcaaagt

SEQ ID NO: 8148 - DNA, 28 bp, Artificial Sequence
  Synthetic
cagtcatttgggtgtaacagcaactcca

SEQ ID NO: 8149 - DNA, 28 bp, Artificial Sequence
  Synthetic
cagtcatttgggtaggtagtttcatgtt

SEQ ID NO: 8150 - DNA, 28 bp, Artificial Sequence
  Synthetic
cagtcatttgggtaggtagttttatgtt

SEQ ID NO: 8151 - DNA, 28 bp, Artificial Sequence
  Synthetic
cagtcatttgggcccagtgttcagacta

SEQ ID NO: 8152 - DNA, 28 bp, Artificial Sequence
  Synthetic
cagtcatttgggtacagtagtctgcaca

SEQ ID NO: 8153 - DNA, 28 bp, Artificial Sequence
  Synthetic
cagtcatttgggcccagtgttcagacta

SEQ ID NO: 8154 - DNA, 28 bp, Artificial Sequence
  Synthetic
cagtcatttgggtgtgcaaatctatgca

SEQ ID NO: 8155 - DNA, 28 bp, Artificial Sequence
  Synthetic
cagtcatttgggtgtgcaaatccatgca

SEQ ID NO: 8156 - DNA, 28 bp, Artificial Sequence
  Synthetic
cagtcatttgggtggaatgtaaagaagt

SEQ ID NO: 8157 - DNA, 28 bp, Artificial Sequence
  Synthetic
cagtcatttgggtggaatgttaagaagt

SEQ ID NO: 8158 - DNA, 28 bp, Artificial Sequence
  Synthetic
cagtcatttgggtaacactgtctggtaa

SEQ ID NO: 8159 - DNA, 28 bp, Artificial Sequence
  Synthetic
cagtcatttgggtaatactgcctggtaa

SEQ ID NO: 8160 - DNA, 28 bp, Artificial Sequence
  Synthetic
cagtcatttgggaggggcatagggcatg

SEQ ID NO: 8161 - DNA, 28 bp, Artificial Sequence
  Synthetic
cagtcatttgggtttcctatgcatatac

SEQ ID NO: 8162 - DNA, 28 bp, Artificial Sequence
  Synthetic
cagtcatttggggtgaaatgtttaggac

SEQ ID NO: 8163 - DNA, 28 bp, Artificial Sequence
  Synthetic
cagtcatttgggttccctttgtcatcct

SEQ ID NO: 8164 - DNA, 28 bp, Artificial Sequence
  Synthetic
cagtcatttgggtccttcattccaccgg

SEQ ID NO: 8165 - DNA, 28 bp, Artificial Sequence
  Synthetic
cagtcatttgggtccttcattccaccgg

SEQ ID NO: 8166 - DNA, 28 bp, Artificial Sequence
  Synthetic
cagtcatttgggtggaatgtaaggaagt

SEQ ID NO: 8167 - DNA, 28 bp, Artificial Sequence
  Synthetic
cagtcatttgggataagacgagcataaa

SEQ ID NO: 8168 - DNA, 28 bp, Artificial Sequence
  Synthetic
cagtcatttgggtaaagtgcttatagtg

SEQ ID NO: 8169 - DNA, 28 bp, Artificial Sequence
  Synthetic
cagtcatttgggactgcataatgagcac

SEQ ID NO: 8170 - DNA, 28 bp, Artificial Sequence
  Synthetic
cagtcatttgggcaaagtgctcatagtg

SEQ ID NO: 8171 - DNA, 28 bp, Artificial Sequence
  Synthetic
cagtcatttgggctgtgcgtgtgacagc

SEQ ID NO: 8172 - DNA, 28 bp, Artificial Sequence
  Synthetic
cagtcatttgggtaacagtctacagtca

SEQ ID NO: 8173 - DNA, 28 bp, Artificial Sequence
  Synthetic
cagtcatttgggacagcaggcacagaca

SEQ ID NO: 8174 - DNA, 28 bp, Artificial Sequence
  Synthetic
cagtcatttgggatgacctatgaaatga

SEQ ID NO: 8175 - DNA, 28 bp, Artificial Sequence
  Synthetic
cagtcatttgggtaatctcagctggcaa

SEQ ID NO: 8176 - DNA, 28 bp, Artificial Sequence
  Synthetic
cagtcatttgggtactgcatcaggaact

SEQ ID NO: 8177 - DNA, 28 bp, Artificial Sequence
  Synthetic
cagtcatttgggttgtgcttgatctaac

SEQ ID NO: 8178 - DNA, 28 bp, Artificial Sequence
  Synthetic
cagtcatttgggtgattgtccaaacgca

SEQ ID NO: 8179 - DNA, 28 bp, Artificial Sequence
  Synthetic
cagtcatttgggaagctgccagttgaag

SEQ ID NO: 8180 - DNA, 28 bp, Artificial Sequence
  Synthetic
cagtcatttgggagttcttcagtggcaa

SEQ ID NO: 8181 - DNA, 28 bp, Artificial Sequence
  Synthetic
cagtcatttgggagctacattgtctgct

SEQ ID NO: 8182 - DNA, 28 bp, Artificial Sequence
  Synthetic
cagtcatttgggagctacatctggctac

SEQ ID NO: 8183 - DNA, 28 bp, Artificial Sequence
  Synthetic
cagtcatttgggtgtcagtttgtcaaat

SEQ ID NO: 8184 - DNA, 28 bp, Artificial Sequence
  Synthetic
cagtcatttgggatcacattgccaggga

SEQ ID NO: 8185 - DNA, 28 bp, Artificial Sequence
  Synthetic
cagtcatttgggatcacattgccaggga

SEQ ID NO: 8186 - DNA, 28 bp, Artificial Sequence
  Synthetic
cagtcatttgggtggctcagttcagcag

SEQ ID NO: 8187 - DNA, 28 bp, Artificial Sequence
  Synthetic
cagtcatttgggtggctcagttcagcag

SEQ ID NO: 8188 - DNA, 28 bp, Artificial Sequence
  Synthetic
cagtcatttgggcattgcacttgtctcg

SEQ ID NO: 8189 - DNA, 28 bp, Artificial Sequence
  Synthetic
cagtcatttgggttcaagtaatccagga

SEQ ID NO: 8190 - DNA, 28 bp, Artificial Sequence
  Synthetic
cagtcatttgggttcacagtggctaagt

SEQ ID NO: 8191 - DNA, 28 bp, Artificial Sequence
  Synthetic
cagtcatttgggttcacagtggctaagt

SEQ ID NO: 8192 - DNA, 28 bp, Artificial Sequence
  Synthetic
cagtcatttgggttcacagtggctaagt

SEQ ID NO: 8193 - DNA, 28 bp, Artificial Sequence
  Synthetic
cagtcatttgggtagcaccatttgaaat

SEQ ID NO: 8194 - DNA, 28 bp, Artificial Sequence
  Synthetic
cagtcatttgggtagcaccatttgaaat

SEQ ID NO: 8195 - DNA, 28 bp, Artificial Sequence
  Synthetic
cagtcatttgggtagcaccatttgaaat

SEQ ID NO: 8196 - DNA, 28 bp, Artificial Sequence
  Synthetic
cagtcatttgggtgaccgatctctcttg

SEQ ID NO: 8197 - DNA, 28 bp, Artificial Sequence
  Synthetic
cagtcatttgggtagcaccatatgaaat

SEQ ID NO: 8198 - DNA, 28 bp, Artificial Sequence
  Synthetic
cagtcatttgggcagtgcaatagtattg

SEQ ID NO: 8199 - DNA, 28 bp, Artificial Sequence
  Synthetic
cagtcatttgggtaagtgctccaatgtt

SEQ ID NO: 8200 - DNA, 28 bp, Artificial Sequence
  Synthetic
cagtcatttgggctttcagtcagatgtt

SEQ ID NO: 8201 - DNA, 28 bp, Artificial Sequence
  Synthetic
cagtcatttgggtgtaaacatcctcgac

SEQ ID NO: 8202 - DNA, 28 bp, Artificial Sequence
  Synthetic
cagtcatttgggtgtaaacatcctacac

SEQ ID NO: 8203 - DNA, 28 bp, Artificial Sequence
  Synthetic
cagtcatttgggtgtaaacatcctacac

SEQ ID NO: 8204 - DNA, 28 bp, Artificial Sequence
  Synthetic
cagtcatttgggtgtaaacatccccgac

SEQ ID NO: 8205 - DNA, 28 bp, Artificial Sequence
  Synthetic
cagtcatttgggtgtaaacatccttgac

SEQ ID NO: 8206 - DNA, 28 bp, Artificial Sequence
  Synthetic
cagtcatttgggaggcaagatgttggca

SEQ ID NO: 8207 - DNA, 28 bp, Artificial Sequence
  Synthetic
cagtcatttgggtccagcatcagtgatt

SEQ ID NO: 8208 - DNA, 28 bp, Artificial Sequence
  Synthetic
cagtcatttggggtgcattgtagttgca

SEQ ID NO: 8209 - DNA, 28 bp, Artificial Sequence
  Synthetic
cagtcatttggggtgcattgttgttgca

SEQ ID NO: 8210 - DNA, 28 bp, Artificial Sequence
  Synthetic
cagtcatttgggtggcagtgtcttagct

SEQ ID NO: 8211 - DNA, 28 bp, Artificial Sequence
  Synthetic
cagtcatttgggcaggcagtgtagttag

SEQ ID NO: 8212 - DNA, 28 bp, Artificial Sequence
  Synthetic
cagtcatttgggaattgcacggtatcca

SEQ ID NO: 8213 - DNA, 28 bp, Artificial Sequence
  Synthetic
cagtcatttgggcgggtggatcacgatg

SEQ ID NO: 8214 - DNA, 28 bp, Artificial Sequence
  Synthetic
cagtcatttgggtaatgcccctaaaaat

SEQ ID NO: 8215 - DNA, 28 bp, Artificial Sequence
  Synthetic
cagtcatttgggaattgcactgtagcaa

SEQ ID NO: 8216 - DNA, 28 bp, Artificial Sequence
  Synthetic
cagtcatttgggagatcagaaggtgatt

SEQ ID NO: 8217 - DNA, 28 bp, Artificial Sequence
  Synthetic
cagtcatttgggaatgacacgatcactc

SEQ ID NO: 8218 - DNA, 28 bp, Artificial Sequence
  Synthetic
cagtcatttgggtaagtgctctctagtt

SEQ ID NO: 8219 - DNA, 28 bp, Artificial Sequence
  Synthetic
cagtcatttgggtaatactgtctggtaa

SEQ ID NO: 8220 - DNA, 28 bp, Artificial Sequence
  Synthetic
cagtcatttgggaggcagtgtaatgtta

SEQ ID NO: 8221 - DNA, 28 bp, Artificial Sequence
  Synthetic
cagtcatttgggaaaccgttaccattac

SEQ ID NO: 8222 - DNA, 28 bp, Artificial Sequence
  Synthetic
cagtcatttgggtatgtgcccttggact

SEQ ID NO: 8223 - DNA, 28 bp, Artificial Sequence
  Synthetic
cagtcatttgggagtgacatcatatgta

SEQ ID NO: 8224 - DNA, 28 bp, Artificial Sequence
  Synthetic
cagtcatttgggttaagacttgcagtga

SEQ ID NO: 8225 - DNA, 28 bp, Artificial Sequence
  Synthetic
cagtcatttgggtggaagactagtgatt

SEQ ID NO: 8226 - DNA, 28 bp, Artificial Sequence
  Synthetic
cagtcatttgggtctttggttatctagc

SEQ ID NO: 8227 - DNA, 28 bp, Artificial Sequence
  Synthetic
cagtcatttgggtaaagctagataaccg

SEQ ID NO: 8228 - DNA, 28 bp, Artificial Sequence
  Synthetic
cagtcatttgggtattgcacttgtcccg

SEQ ID NO: 8229 - DNA, 28 bp, Artificial Sequence
  Synthetic
cagtcatttgggtattgcactcgtcccg

SEQ ID NO: 8230 - DNA, 28 bp, Artificial Sequence
  Synthetic
cagtcatttgggcaaagtgctgttcgtg

SEQ ID NO: 8231 - DNA, 28 bp, Artificial Sequence
  Synthetic
cagtcatttgggtcaagtgctgttcgtg

SEQ ID NO: 8232 - DNA, 28 bp, Artificial Sequence
  Synthetic
cagtcatttgggtttggcactagcacat

SEQ ID NO: 8233 - DNA, 28 bp, Artificial Sequence
  Synthetic
cagtcatttgggtgaggtagtaagttgt

SEQ ID NO: 8234 - DNA, 28 bp, Artificial Sequence
  Synthetic
cagtcatttgggaacccgtagatccgat

SEQ ID NO: 8235 - DNA, 28 bp, Artificial Sequence
  Synthetic
cagtcatttgggtctttggttatctagc

SEQ ID NO: 8236 - DNA, 28 bp, Artificial Sequence
  Synthetic
cagtcatttgggtaaagctagataaccg

SEQ ID NO: 8237 - DNA, 28 bp, Artificial Sequence
  Synthetic
cagtcatttgggtctttggttacctagc

SEQ ID NO: 8238 - DNA, 28 bp, Artificial Sequence
  Synthetic
cagtcatttgggtaaagctagacaaccg

SEQ ID NO: 8239 - DNA, 28 bp, Artificial Sequence
  Synthetic
cagtcatttgggtgacagaagagagtga

SEQ ID NO: 8240 - DNA, 28 bp, Artificial Sequence
  Synthetic
cagtcatttgggtgacagaagagagtga

SEQ ID NO: 8241 - DNA, 28 bp, Artificial Sequence
  Synthetic
cagtcatttgggtgacagaagagagtga

SEQ ID NO: 8242 - DNA, 28 bp, Artificial Sequence
  Synthetic
cagtcatttgggtgacagaagagagtga

SEQ ID NO: 8243 - DNA, 28 bp, Artificial Sequence
  Synthetic
cagtcatttgggtgacagaagagagtga

SEQ ID NO: 8244 - DNA, 28 bp, Artificial Sequence
  Synthetic
cagtcatttgggtgacagaagagagtga

SEQ ID NO: 8245 - DNA, 28 bp, Artificial Sequence
  Synthetic
cagtcatttgggtgacagaagagagtga

SEQ ID NO: 8246 - DNA, 28 bp, Artificial Sequence
  Synthetic
cagtcatttgggtgacagaagagagtga

SEQ ID NO: 8247 - DNA, 28 bp, Artificial Sequence
  Synthetic
cagtcatttgggtgacagaagagagtga

SEQ ID NO: 8248 - DNA, 28 bp, Artificial Sequence
  Synthetic
cagtcatttgggtgacagaagagagaga

SEQ ID NO: 8249 - DNA, 28 bp, Artificial Sequence
  Synthetic
cagtcatttgggtgacagaagagagcga

SEQ ID NO: 8250 - DNA, 28 bp, Artificial Sequence
  Synthetic
cagtcatttgggtttggattgaagggag

SEQ ID NO: 8251 - DNA, 28 bp, Artificial Sequence
  Synthetic
cagtcatttgggtttggattgaagggag

SEQ ID NO: 8252 - DNA, 28 bp, Artificial Sequence
  Synthetic
cagtcatttgggcttggattgaagggag

SEQ ID NO: 8253 - DNA, 28 bp, Artificial Sequence
  Synthetic
cagtcatttgggcttggattgaagggag

SEQ ID NO: 8254 - DNA, 28 bp, Artificial Sequence
  Synthetic
cagtcatttgggtgcctggctccctgta

SEQ ID NO: 8255 - DNA, 28 bp, Artificial Sequence
  Synthetic
cagtcatttgggtgcctggctccctgta

SEQ ID NO: 8256 - DNA, 28 bp, Artificial Sequence
  Synthetic
cagtcatttgggtgcctggctccctgta

SEQ ID NO: 8257 - DNA, 28 bp, Artificial Sequence
  Synthetic
cagtcatttgggtgcctggctccctgta

SEQ ID NO: 8258 - DNA, 28 bp, Artificial Sequence
  Synthetic
cagtcatttgggtgcctggctccctgta

SEQ ID NO: 8259 - DNA, 28 bp, Artificial Sequence
  Synthetic
cagtcatttgggtgcctggctccctgta

SEQ ID NO: 8260 - DNA, 28 bp, Artificial Sequence
  Synthetic
cagtcatttgggtcgataaacctctgca

SEQ ID NO: 8261 - DNA, 28 bp, Artificial Sequence
  Synthetic
cagtcatttgggtggagaagcagggcac

SEQ ID NO: 8262 - DNA, 28 bp, Artificial Sequence
  Synthetic
cagtcatttgggtggagaagcagggcac

SEQ ID NO: 8263 - DNA, 28 bp, Artificial Sequence
  Synthetic
cagtcatttgggtggagaagcagggcac

SEQ ID NO: 8264 - DNA, 28 bp, Artificial Sequence
  Synthetic
cagtcatttgggtggagaagcagggcac

SEQ ID NO: 8265 - DNA, 28 bp, Artificial Sequence
  Synthetic
cagtcatttgggtcggaccaggcttcat

SEQ ID NO: 8266 - DNA, 28 bp, Artificial Sequence
  Synthetic
cagtcatttgggtcggaccaggcttcat

SEQ ID NO: 8267 - DNA, 28 bp, Artificial Sequence
  Synthetic
cagtcatttgggtcggaccaggcttcat

SEQ ID NO: 8268 - DNA, 28 bp, Artificial Sequence
  Synthetic
cagtcatttgggtcggaccaggcttcat

SEQ ID NO: 8269 - DNA, 28 bp, Artificial Sequence
  Synthetic
cagtcatttgggtcggaccaggcttcat

SEQ ID NO: 8270 - DNA, 28 bp, Artificial Sequence
  Synthetic
cagtcatttgggtcggaccaggcttcat

SEQ ID NO: 8271 - DNA, 28 bp, Artificial Sequence
  Synthetic
cagtcatttgggtcggaccaggcttcat

SEQ ID NO: 8272 - DNA, 28 bp, Artificial Sequence
  Synthetic
cagtcatttgggtcggaccaggcttcat

SEQ ID NO: 8273 - DNA, 28 bp, Artificial Sequence
  Synthetic
cagtcatttgggtcggaccaggcttcat

SEQ ID NO: 8274 - DNA, 28 bp, Artificial Sequence
  Synthetic
cagtcatttgggtcggaccaggcttcaa

SEQ ID NO: 8275 - DNA, 28 bp, Artificial Sequence
  Synthetic
cagtcatttgggtcggaccaggcttcaa

SEQ ID NO: 8276 - DNA, 28 bp, Artificial Sequence
  Synthetic
cagtcatttgggtcggaccaggcttcat

SEQ ID NO: 8277 - DNA, 28 bp, Artificial Sequence
  Synthetic
cagtcatttgggtcggaccaggcttcat

SEQ ID NO: 8278 - DNA, 28 bp, Artificial Sequence
  Synthetic
cagtcatttgggtgaagctgccagcatg

SEQ ID NO: 8279 - DNA, 28 bp, Artificial Sequence
  Synthetic
cagtcatttgggtgaagctgccagcatg

SEQ ID NO: 8280 - DNA, 28 bp, Artificial Sequence
  Synthetic
cagtcatttgggtgaagctgccagcatg

SEQ ID NO: 8281 - DNA, 28 bp, Artificial Sequence
  Synthetic
cagtcatttgggtgaagctgccagcatg

SEQ ID NO: 8282 - DNA, 28 bp, Artificial Sequence
  Synthetic
cagtcatttgggtgaagctgccagcatg

SEQ ID NO: 8283 - DNA, 28 bp, Artificial Sequence
  Synthetic
cagtcatttgggtgaagctgccagcatg

SEQ ID NO: 8284 - DNA, 28 bp, Artificial Sequence
  Synthetic
cagtcatttgggtgaagctgccagcatg

SEQ ID NO: 8285 - DNA, 28 bp, Artificial Sequence
  Synthetic
cagtcatttgggtgaagctgccagcatg

SEQ ID NO: 8286 - DNA, 28 bp, Artificial Sequence
  Synthetic
cagtcatttgggtgaagctgccagcatg

SEQ ID NO: 8287 - DNA, 28 bp, Artificial Sequence
  Synthetic
cagtcatttgggtcgcttggtgcagatc

SEQ ID NO: 8288 - DNA, 28 bp, Artificial Sequence
  Synthetic
cagtcatttgggtcgcttggtgcagatc

SEQ ID NO: 8289 - DNA, 28 bp, Artificial Sequence
  Synthetic
cagtcatttgggcagccaaggatgactt

SEQ ID NO: 8290 - DNA, 28 bp, Artificial Sequence
  Synthetic
cagtcatttgggcagccaaggatgactt

SEQ ID NO: 8291 - DNA, 28 bp, Artificial Sequence
  Synthetic
cagtcatttgggcagccaaggatgactt

SEQ ID NO: 8292 - DNA, 28 bp, Artificial Sequence
  Synthetic
cagtcatttgggtagccaaggagactgc

SEQ ID NO: 8293 - DNA, 28 bp, Artificial Sequence
  Synthetic
cagtcatttgggtagccaaggagactgc

SEQ ID NO: 8294 - DNA, 28 bp, Artificial Sequence
  Synthetic
cagtcatttgggtagccaaggatgactt

SEQ ID NO: 8295 - DNA, 28 bp, Artificial Sequence
  Synthetic
cagtcatttgggtagccaaggatgactt

SEQ ID NO: 8296 - DNA, 28 bp, Artificial Sequence
  Synthetic
cagtcatttgggtagccaaggatgactt

SEQ ID NO: 8297 - DNA, 28 bp, Artificial Sequence
  Synthetic
cagtcatttgggtagccaaggatgactt

SEQ ID NO: 8298 - DNA, 28 bp, Artificial Sequence
  Synthetic
cagtcatttgggtagccaaggatgactt

SEQ ID NO: 8299 - DNA, 28 bp, Artificial Sequence
  Synthetic
cagtcatttgggtagccaaggatgactt

SEQ ID NO: 8300 - DNA, 28 bp, Artificial Sequence
  Synthetic
cagtcatttgggtgattgagccgcgcca

SEQ ID NO: 8301 - DNA, 28 bp, Artificial Sequence
  Synthetic
cagtcatttgggttgagccgtgccaata

SEQ ID NO: 8302 - DNA, 28 bp, Artificial Sequence
  Synthetic
cagtcatttgggtgactgagccgtgcca

SEQ ID NO: 8303 - DNA, 28 bp, Artificial Sequence
  Synthetic
cagtcatttgggtgattgagccgtgcca

SEQ ID NO: 8304 - DNA, 28 bp, Artificial Sequence
  Synthetic
cagtcatttgggtgattgagccgtgcca

SEQ ID NO: 8305 - DNA, 28 bp, Artificial Sequence
  Synthetic
cagtcatttgggttgagccgtgccaata

SEQ ID NO: 8306 - DNA, 28 bp, Artificial Sequence
  Synthetic
cagtcatttggggaggtgagccgagcca

SEQ ID NO: 8307 - DNA, 28 bp, Artificial Sequence
  Synthetic
cagtcatttggggtgagccgaaccaata

SEQ ID NO: 8308 - DNA, 28 bp, Artificial Sequence
  Synthetic
cagtcatttgggtgattgagccgtgcca

SEQ ID NO: 8309 - DNA, 28 bp, Artificial Sequence
  Synthetic
cagtcatttgggtgattgagccgtgcca

SEQ ID NO: 8310 - DNA, 28 bp, Artificial Sequence
  Synthetic
cagtcatttggggtgagccgaaccaata

SEQ ID NO: 8311 - DNA, 28 bp, Artificial Sequence
  Synthetic
cagtcatttgggagaatcttgatgatgc

SEQ ID NO: 8312 - DNA, 28 bp, Artificial Sequence
  Synthetic
cagtcatttgggagaatcttgatgatgc

SEQ ID NO: 8313 - DNA, 28 bp, Artificial Sequence
  Synthetic
cagtcatttgggagaatcttgatgatgc

SEQ ID NO: 8314 - DNA, 28 bp, Artificial Sequence
  Synthetic
cagtcatttgggagaatcttgatgatgc

SEQ ID NO: 8315 - DNA, 28 bp, Artificial Sequence
  Synthetic
cagtcatttgggggaatcttgatgatgc

SEQ ID NO: 8316 - DNA, 28 bp, Artificial Sequence
  Synthetic
cagtcatttgggttggactgaagggtgc

SEQ ID NO: 8317 - DNA, 28 bp, Artificial Sequence
  Synthetic
cagtcatttgggttggactgaagggtgc

SEQ ID NO: 8318 - DNA, 28 bp, Artificial Sequence
  Synthetic
cagtcatttgggttggactgaagggtgc

SEQ ID NO: 8319 - DNA, 28 bp, Artificial Sequence
  Synthetic
cagtcatttgggttggactgaagggtgc

SEQ ID NO: 8320 - DNA, 28 bp, Artificial Sequence
  Synthetic
cagtcatttgggtccaaagggatcgcat

SEQ ID NO: 8321 - DNA, 28 bp, Artificial Sequence
  Synthetic
cagtcatttgggttggcattctgtccac

SEQ ID NO: 8322 - DNA, 28 bp, Artificial Sequence
  Synthetic
cagtcatttgggttggcattctgtccac

SEQ ID NO: 8323 - DNA, 28 bp, Artificial Sequence
  Synthetic
cagtcatttggggtgaagtgtttggggg

SEQ ID NO: 8324 - DNA, 28 bp, Artificial Sequence
  Synthetic
cagtcatttggggtgaagtgtttggggg

SEQ ID NO: 8325 - DNA, 28 bp, Artificial Sequence
  Synthetic
cagtcatttggggtgaagtgtttggagg

SEQ ID NO: 8326 - DNA, 28 bp, Artificial Sequence
  Synthetic
cagtcatttgggttccacagctttcttg

SEQ ID NO: 8327 - DNA, 28 bp, Artificial Sequence
  Synthetic
cagtcatttgggttccacagctttcttg

SEQ ID NO: 8328 - DNA, 28 bp, Artificial Sequence
  Synthetic
cagtcatttgggtgccaaaggagaattg

SEQ ID NO: 8329 - DNA, 28 bp, Artificial Sequence
  Synthetic
cagtcatttgggtgccaaaggagagctg

SEQ ID NO: 8330 - DNA, 28 bp, Artificial Sequence
  Synthetic
cagtcatttgggtgccaaaggagaattg

SEQ ID NO: 8331 - DNA, 28 bp, Artificial Sequence
  Synthetic
cagtcatttgggtgccaaaggagagctg

SEQ ID NO: 8332 - DNA, 28 bp, Artificial Sequence
  Synthetic
cagtcatttgggtgccaaaggagagttg

SEQ ID NO: 8333 - DNA, 28 bp, Artificial Sequence
  Synthetic
cagtcatttgggtgccaaaggaaatttg

SEQ ID NO: 8334 - DNA, 28 bp, Artificial Sequence
  Synthetic
cagtcatttgggctgcactgcctcttcc

SEQ ID NO: 8335 - DNA, 23 bp, Artificial Sequence
  Synthetic
ccgttttttttttttaatcagct

SEQ ID NO: 8336 - DNA, 23 bp, Artificial Sequence
  Synthetic
ccgttttttttttttactataca

SEQ ID NO: 8337 - DNA, 23 bp, Artificial Sequence
  Synthetic
ccgttttttttttttctccatac

SEQ ID NO: 8338 - DNA, 23 bp, Artificial Sequence
  Synthetic
ccgttttttttttttacaaattc

SEQ ID NO: 8339 - DNA, 23 bp, Artificial Sequence
  Synthetic
ccgttttttttttttcacaagtt

SEQ ID NO: 8340 - DNA, 23 bp, Artificial Sequence
  Synthetic
ccgttttttttttttcttggcat

SEQ ID NO: 8341 - DNA, 23 bp, Artificial Sequence
  Synthetic
ccgttttttttttttcacaagtt

SEQ ID NO: 8342 - DNA, 23 bp, Artificial Sequence
  Synthetic
ccgttttttttttttacagctgg

SEQ ID NO: 8343 - DNA, 23 bp, Artificial Sequence
  Synthetic
ccgttttttttttttactcgtca

SEQ ID NO: 8344 - DNA, 23 bp, Artificial Sequence
  Synthetic
ccgttttttttttttaggagaga

SEQ ID NO: 8345 - DNA, 23 bp, Artificial Sequence
  Synthetic
ccgttttttttttttcccttatc

SEQ ID NO: 8346 - DNA, 23 bp, Artificial Sequence
  Synthetic
ccgttttttttttttatcacagc

SEQ ID NO: 8347 - DNA, 23 bp, Artificial Sequence
  Synthetic
ccgttttttttttttagccgttg

SEQ ID NO: 8348 - DNA, 23 bp, Artificial Sequence
  Synthetic
ccgttttttttttttcaagaatt

SEQ ID NO: 8349 - DNA, 23 bp, Artificial Sequence
  Synthetic
ccgttttttttttttgtgaattc

SEQ ID NO: 8350 - DNA, 23 bp, Artificial Sequence
  Synthetic
ccgttttttttttttcgcgcgct

SEQ ID NO: 8351 - DNA, 23 bp, Artificial Sequence
  Synthetic
ccgttttttttttttcgtaggaa

SEQ ID NO: 8352 - DNA, 23 bp, Artificial Sequence
  Synthetic
ccgttttttttttttgtcgtacc

SEQ ID NO: 8353 - DNA, 23 bp, Artificial Sequence
  Synthetic
ccgttttttttttttaaacggac

SEQ ID NO: 8354 - DNA, 23 bp, Artificial Sequence
  Synthetic
ccgttttttttttttaatgagtg

SEQ ID NO: 8355 - DNA, 23 bp, Artificial Sequence
  Synthetic
ccgttttttttttttataaagag

SEQ ID NO: 8356 - DNA, 23 bp, Artificial Sequence
  Synthetic
ccgttttttttttttacagacaa

SEQ ID NO: 8357 - DNA, 23 bp, Artificial Sequence
  Synthetic
ccgttttttttttttagaattac

SEQ ID NO: 8358 - DNA, 23 bp, Artificial Sequence
  Synthetic
ccgttttttttttttcagagcac

SEQ ID NO: 8359 - DNA, 23 bp, Artificial Sequence
  Synthetic
ccgttttttttttttctcactca

SEQ ID NO: 8360 - DNA, 23 bp, Artificial Sequence
  Synthetic
ccgttttttttttttctcacagt

SEQ ID NO: 8361 - DNA, 23 bp, Artificial Sequence
  Synthetic
ccgttttttttttttgctttctg

SEQ ID NO: 8362 - DNA, 23 bp, Artificial Sequence
  Synthetic
ccgttttttttttttactgagat

SEQ ID NO: 8363 - DNA, 23 bp, Artificial Sequence
  Synthetic
ccgttttttttttttacaacaaa

SEQ ID NO: 8364 - DNA, 23 bp, Artificial Sequence
  Synthetic
ccgttttttttttttatgctttg

SEQ ID NO: 8365 - DNA, 23 bp, Artificial Sequence
  Synthetic
ccgttttttttttttgacatctt

SEQ ID NO: 8366 - DNA, 23 bp, Artificial Sequence
  Synthetic
ccgttttttttttttataggccg

SEQ ID NO: 8367 - DNA, 23 bp, Artificial Sequence
  Synthetic
ccgttttttttttttgcaggccg

SEQ ID NO: 8368 - DNA, 23 bp, Artificial Sequence
  Synthetic
ccgttttttttttttcatacagc

SEQ ID NO: 8369 - DNA, 23 bp, Artificial Sequence
  Synthetic
ccgttttttttttttcatacagc

SEQ ID NO: 8370 - DNA, 23 bp, Artificial Sequence
  Synthetic
ccgttttttttttttctacagct

SEQ ID NO: 8371 - DNA, 23 bp, Artificial Sequence
  Synthetic
ccgttttttttttttcaggatac

SEQ ID NO: 8372 - DNA, 23 bp, Artificial Sequence
  Synthetic
ccgttttttttttttcacaagtt

SEQ ID NO: 8373 - DNA, 23 bp, Artificial Sequence
  Synthetic
ccgttttttttttttcttcagtt

SEQ ID NO: 8374 - DNA, 23 bp, Artificial Sequence
  Synthetic
ccgttttttttttttcatagccc

SEQ ID NO: 8375 - DNA, 23 bp, Artificial Sequence
  Synthetic
ccgttttttttttttgctacctg

SEQ ID NO: 8376 - DNA, 23 bp, Artificial Sequence
  Synthetic
ccgttttttttttttatctgcac

SEQ ID NO: 8377 - DNA, 23 bp, Artificial Sequence
  Synthetic
ccgttttttttttttcacaaatt

SEQ ID NO: 8378 - DNA, 23 bp, Artificial Sequence
  Synthetic
ccgttttttttttttggcattca

SEQ ID NO: 8379 - DNA, 23 bp, Artificial Sequence
  Synthetic
ccgttttttttttttcacaagtt

SEQ ID NO: 8380 - DNA, 23 bp, Artificial Sequence
  Synthetic
ccgttttttttttttagccaagc

SEQ ID NO: 8381 - DNA, 23 bp, Artificial Sequence
  Synthetic
ccgttttttttttttaaaagaga

SEQ ID NO: 8382 - DNA, 23 bp, Artificial Sequence
  Synthetic
ccgttttttttttttacagctgg

SEQ ID NO: 8383 - DNA, 23 bp, Artificial Sequence
  Synthetic
ccgttttttttttttcacatagg

SEQ ID NO: 8384 - DNA, 23 bp, Artificial Sequence
  Synthetic
ccgttttttttttttcacaaacc

SEQ ID NO: 8385 - DNA, 23 bp, Artificial Sequence
  Synthetic
ccgttttttttttttgtaaacca

SEQ ID NO: 8386 - DNA, 23 bp, Artificial Sequence
  Synthetic
ccgttttttttttttcgccaata

SEQ ID NO: 8387 - DNA, 23 bp, Artificial Sequence
  Synthetic
ccgttttttttttttacaagtgc

SEQ ID NO: 8388 - DNA, 23 bp, Artificial Sequence
  Synthetic
ccgttttttttttttactacctg

SEQ ID NO: 8389 - DNA, 23 bp, Artificial Sequence
  Synthetic
ccgttttttttttttatctgcac

SEQ ID NO: 8390 - DNA, 23 bp, Artificial Sequence
  Synthetic
ccgttttttttttttccacatgg

SEQ ID NO: 8391 - DNA, 23 bp, Artificial Sequence
  Synthetic
ccgttttttttttttcccaacaa

SEQ ID NO: 8392 - DNA, 23 bp, Artificial Sequence
  Synthetic
ccgttttttttttttgctgggtg

SEQ ID NO: 8393 - DNA, 23 bp, Artificial Sequence
  Synthetic
ccgttttttttttttcctagctc

SEQ ID NO: 8394 - DNA, 23 bp, Artificial Sequence
  Synthetic
ccgttttttttttttcagttttg

SEQ ID NO: 8395 - DNA, 23 bp, Artificial Sequence
  Synthetic
ccgttttttttttttcagttttg

SEQ ID NO: 8396 - DNA, 23 bp, Artificial Sequence
  Synthetic
ccgttttttttttttacctgcac

SEQ ID NO: 8397 - DNA, 23 bp, Artificial Sequence
  Synthetic
ccgttttttttttttcagactcc

SEQ ID NO: 8398 - DNA, 23 bp, Artificial Sequence
  Synthetic
ccgttttttttttttcaacatca

SEQ ID NO: 8399 - DNA, 23 bp, Artificial Sequence
  Synthetic
ccgttttttttttttctgcctgt

SEQ ID NO: 8400 - DNA, 23 bp, Artificial Sequence
  Synthetic
ccgttttttttttttacatggtt

SEQ ID NO: 8401 - DNA, 23 bp, Artificial Sequence
  Synthetic
ccgttttttttttttacagttct

SEQ ID NO: 8402 - DNA, 23 bp, Artificial Sequence
  Synthetic
ccgttttttttttttgagaccca

SEQ ID NO: 8403 - DNA, 23 bp, Artificial Sequence
  Synthetic
ccgttttttttttttggaaatcc

SEQ ID NO: 8404 - DNA, 23 bp, Artificial Sequence
  Synthetic
ccgttttttttttttggcggaac

SEQ ID NO: 8405 - DNA, 23 bp, Artificial Sequence
  Synthetic
ccgttttttttttttctcaatag

SEQ ID NO: 8406 - DNA, 23 bp, Artificial Sequence
  Synthetic
ccgttttttttttttaaccgatt

SEQ ID NO: 8407 - DNA, 23 bp, Artificial Sequence
  Synthetic
ccgttttttttttttactgattt

SEQ ID NO: 8408 - DNA, 23 bp, Artificial Sequence
  Synthetic
ccgttttttttttttgctgagtg

SEQ ID NO: 8409 - DNA, 23 bp, Artificial Sequence
  Synthetic
ccgttttttttttttacaaccag

SEQ ID NO: 8410 - DNA, 23 bp, Artificial Sequence
  Synthetic
ccgttttttttttttcatacagc

SEQ ID NO: 8411 - DNA, 23 bp, Artificial Sequence
  Synthetic
ccgttttttttttttacaggccg

SEQ ID NO: 8412 - DNA, 23 bp, Artificial Sequence
  Synthetic
ccgttttttttttttctacctgc

SEQ ID NO: 8413 - DNA, 23 bp, Artificial Sequence
  Synthetic
ccgttttttttttttaacaatac

SEQ ID NO: 8414 - DNA, 23 bp, Artificial Sequence
  Synthetic
ccgttttttttttttaatcagct

SEQ ID NO: 8415 - DNA, 23 bp, Artificial Sequence
  Synthetic
ccgttttttttttttctccatac

SEQ ID NO: 8416 - DNA, 23 bp, Artificial Sequence
  Synthetic
ccgttttttttttttaccagtac

SEQ ID NO: 8417 - DNA, 23 bp, Artificial Sequence
  Synthetic
ccgttttttttttttcttggcat

SEQ ID NO: 8418 - DNA, 23 bp, Artificial Sequence
  Synthetic
ccgttttttttttttcacaagtt

SEQ ID NO: 8419 - DNA, 23 bp, Artificial Sequence
  Synthetic
ccgttttttttttttacagctgg

SEQ ID NO: 8420 - DNA, 23 bp, Artificial Sequence
  Synthetic
ccgttttttttttttgcccttat

SEQ ID NO: 8421 - DNA, 23 bp, Artificial Sequence
  Synthetic
ccgttttttttttttgctcatca

SEQ ID NO: 8422 - DNA, 23 bp, Artificial Sequence
  Synthetic
ccgttttttttttttagccgctg

SEQ ID NO: 8423 - DNA, 23 bp, Artificial Sequence
  Synthetic
ccgttttttttttttcaagaatt

SEQ ID NO: 8424 - DNA, 23 bp, Artificial Sequence
  Synthetic
ccgttttttttttttgtgaattc

SEQ ID NO: 8425 - DNA, 23 bp, Artificial Sequence
  Synthetic
ccgttttttttttttagagcacg

SEQ ID NO: 8426 - DNA, 23 bp, Artificial Sequence
  Synthetic
ccgttttttttttttgtcgtacc

SEQ ID NO: 8427 - DNA, 23 bp, Artificial Sequence
  Synthetic
ccgttttttttttttaaacggac

SEQ ID NO: 8428 - DNA, 23 bp, Artificial Sequence
  Synthetic
ccgttttttttttttacaaagag

SEQ ID NO: 8429 - DNA, 23 bp, Artificial Sequence
  Synthetic
ccgttttttttttttacagacaa

SEQ ID NO: 8430 - DNA, 23 bp, Artificial Sequence
  Synthetic
ccgttttttttttttcagagcac

SEQ ID NO: 8431 - DNA, 23 bp, Artificial Sequence
  Synthetic
ccgttttttttttttgctttctg

SEQ ID NO: 8432 - DNA, 23 bp, Artificial Sequence
  Synthetic
ccgttttttttttttactgagat

SEQ ID NO: 8433 - DNA, 23 bp, Artificial Sequence
  Synthetic
ccgttttttttttttacaacaaa

SEQ ID NO: 8434 - DNA, 23 bp, Artificial Sequence
  Synthetic
ccgttttttttttttgacatctt

SEQ ID NO: 8435 - DNA, 23 bp, Artificial Sequence
  Synthetic
ccgttttttttttttcatacagc

SEQ ID NO: 8436 - DNA, 23 bp, Artificial Sequence
  Synthetic
ccgttttttttttttcataaagc

SEQ ID NO: 8437 - DNA, 23 bp, Artificial Sequence
  Synthetic
ccgttttttttttttcaggatac

SEQ ID NO: 8438 - DNA, 23 bp, Artificial Sequence
  Synthetic
ccgttttttttttttgtgctcac

SEQ ID NO: 8439 - DNA, 23 bp, Artificial Sequence
  Synthetic
ccgttttttttttttgtgctcac

SEQ ID NO: 8440 - DNA, 23 bp, Artificial Sequence
  Synthetic
ccgttttttttttttgtgctcac

SEQ ID NO: 8441 - DNA, 23 bp, Artificial Sequence
  Synthetic
ccgttttttttttttgtgctcac

SEQ ID NO: 8442 - DNA, 23 bp, Artificial Sequence
  Synthetic
ccgttttttttttttgtgctcac

SEQ ID NO: 8443 - DNA, 23 bp, Artificial Sequence
  Synthetic
ccgttttttttttttgtgctcac

SEQ ID NO: 8444 - DNA, 23 bp, Artificial Sequence
  Synthetic
ccgttttttttttttgtgctcac

SEQ ID NO: 8445 - DNA, 23 bp, Artificial Sequence
  Synthetic
ccgttttttttttttgtgctctc

SEQ ID NO: 8446 - DNA, 23 bp, Artificial Sequence
  Synthetic
ccgttttttttttttgtgctctc

SEQ ID NO: 8447 - DNA, 23 bp, Artificial Sequence
  Synthetic
ccgttttttttttttgtgctctc

SEQ ID NO: 8448 - DNA, 23 bp, Artificial Sequence
  Synthetic
ccgttttttttttttgtgctctc

SEQ ID NO: 8449 - DNA, 23 bp, Artificial Sequence
  Synthetic
ccgttttttttttttgtgctctc

SEQ ID NO: 8450 - DNA, 23 bp, Artificial Sequence
  Synthetic
ccgttttttttttttgctttgtc

SEQ ID NO: 8451 - DNA, 23 bp, Artificial Sequence
  Synthetic
ccgttttttttttttgctttgtc

SEQ ID NO: 8452 - DNA, 23 bp, Artificial Sequence
  Synthetic
ccgttttttttttttagagctcc

SEQ ID NO: 8453 - DNA, 23 bp, Artificial Sequence
  Synthetic
ccgttttttttttttaagagctc

SEQ ID NO: 8454 - DNA, 23 bp, Artificial Sequence
  Synthetic
ccgttttttttttttaggagctc

SEQ ID NO: 8455 - DNA, 23 bp, Artificial Sequence
  Synthetic
ccgttttttttttttggcataca

SEQ ID NO: 8456 - DNA, 23 bp, Artificial Sequence
  Synthetic
ccgttttttttttttggcataca

SEQ ID NO: 8457 - DNA, 23 bp, Artificial Sequence
  Synthetic
ccgttttttttttttggcataca

SEQ ID NO: 8458 - DNA, 23 bp, Artificial Sequence
  Synthetic
ccgttttttttttttccccgatg

SEQ ID NO: 8459 - DNA, 23 bp, Artificial Sequence
  Synthetic
ccgttttttttttttctggatgc

SEQ ID NO: 8460 - DNA, 23 bp, Artificial Sequence
  Synthetic
ccgttttttttttttctggatgc

SEQ ID NO: 8461 - DNA, 23 bp, Artificial Sequence
  Synthetic
ccgttttttttttttatcgaagt

SEQ ID NO: 8462 - DNA, 23 bp, Artificial Sequence
  Synthetic
ccgttttttttttttgcacgtgc

SEQ ID NO: 8463 - DNA, 23 bp, Artificial Sequence
  Synthetic
ccgttttttttttttgcacgtgc

SEQ ID NO: 8464 - DNA, 23 bp, Artificial Sequence
  Synthetic
ccgttttttttttttcgcacgtg

SEQ ID NO: 8465 - DNA, 23 bp, Artificial Sequence
  Synthetic
ccgttttttttttttgggggatg

SEQ ID NO: 8466 - DNA, 23 bp, Artificial Sequence
  Synthetic
ccgttttttttttttgggggatg

SEQ ID NO: 8467 - DNA, 23 bp, Artificial Sequence
  Synthetic
ccgttttttttttttggggaatg

SEQ ID NO: 8468 - DNA, 23 bp, Artificial Sequence
  Synthetic
ccgttttttttttttggggaatg

SEQ ID NO: 8469 - DNA, 23 bp, Artificial Sequence
  Synthetic
ccgttttttttttttggggaatg

SEQ ID NO: 8470 - DNA, 23 bp, Artificial Sequence
  Synthetic
ccgttttttttttttggggaatg

SEQ ID NO: 8471 - DNA, 23 bp, Artificial Sequence
  Synthetic
ccgttttttttttttggggaatg

SEQ ID NO: 8472 - DNA, 23 bp, Artificial Sequence
  Synthetic
ccgttttttttttttggggaatg

SEQ ID NO: 8473 - DNA, 23 bp, Artificial Sequence
  Synthetic
ccgttttttttttttggggaatg

SEQ ID NO: 8474 - DNA, 23 bp, Artificial Sequence
  Synthetic
ccgttttttttttttagatcatg

SEQ ID NO: 8475 - DNA, 23 bp, Artificial Sequence
  Synthetic
ccgttttttttttttagatcatg

SEQ ID NO: 8476 - DNA, 23 bp, Artificial Sequence
  Synthetic
ccgttttttttttttaagatcat

SEQ ID NO: 8477 - DNA, 23 bp, Artificial Sequence
  Synthetic
ccgttttttttttttccagatca

SEQ ID NO: 8478 - DNA, 23 bp, Artificial Sequence
  Synthetic
ccgttttttttttttcccgacct

SEQ ID NO: 8479 - DNA, 23 bp, Artificial Sequence
  Synthetic
ccgttttttttttttcccgacct

SEQ ID NO: 8480 - DNA, 23 bp, Artificial Sequence
  Synthetic
ccgttttttttttttcggcaagt

SEQ ID NO: 8481 - DNA, 23 bp, Artificial Sequence
  Synthetic
ccgttttttttttttccggcaag

SEQ ID NO: 8482 - DNA, 23 bp, Artificial Sequence
  Synthetic
ccgttttttttttttccggcaag

SEQ ID NO: 8483 - DNA, 23 bp, Artificial Sequence
  Synthetic
ccgttttttttttttcggcaagt

SEQ ID NO: 8484 - DNA, 23 bp, Artificial Sequence
  Synthetic
ccgttttttttttttcggcaagt

SEQ ID NO: 8485 - DNA, 23 bp, Artificial Sequence
  Synthetic
ccgttttttttttttcggcaagt

SEQ ID NO: 8486 - DNA, 23 bp, Artificial Sequence
  Synthetic
ccgttttttttttttcggcaagt

SEQ ID NO: 8487 - DNA, 23 bp, Artificial Sequence
  Synthetic
ccgttttttttttttagccaagg

SEQ ID NO: 8488 - DNA, 23 bp, Artificial Sequence
  Synthetic
ccgttttttttttttcaggcaag

SEQ ID NO: 8489 - DNA, 23 bp, Artificial Sequence
  Synthetic
ccgttttttttttttcaggcaag

SEQ ID NO: 8490 - DNA, 23 bp, Artificial Sequence
  Synthetic
ccgttttttttttttcaggcaag

SEQ ID NO: 8491 - DNA, 23 bp, Artificial Sequence
  Synthetic
ccgttttttttttttcaggcaag

SEQ ID NO: 8492 - DNA, 23 bp, Artificial Sequence
  Synthetic
ccgttttttttttttcaggcaag

SEQ ID NO: 8493 - DNA, 23 bp, Artificial Sequence
  Synthetic
ccgttttttttttttcaggcaag

SEQ ID NO: 8494 - DNA, 23 bp, Artificial Sequence
  Synthetic
ccgttttttttttttcaggcaag

SEQ ID NO: 8495 - DNA, 23 bp, Artificial Sequence
  Synthetic
ccgttttttttttttgatattga

SEQ ID NO: 8496 - DNA, 23 bp, Artificial Sequence
  Synthetic
ccgttttttttttttgatattgg

SEQ ID NO: 8497 - DNA, 23 bp, Artificial Sequence
  Synthetic
ccgttttttttttttcgtgatat

SEQ ID NO: 8498 - DNA, 23 bp, Artificial Sequence
  Synthetic
ccgttttttttttttcgtgatat

SEQ ID NO: 8499 - DNA, 23 bp, Artificial Sequence
  Synthetic
ccgttttttttttttatgcagca

SEQ ID NO: 8500 - DNA, 23 bp, Artificial Sequence
  Synthetic
ccgttttttttttttatgcagca

SEQ ID NO: 8501 - DNA, 23 bp, Artificial Sequence
  Synthetic
ccgttttttttttttgtgaatct

SEQ ID NO: 8502 - DNA, 23 bp, Artificial Sequence
  Synthetic
ccgttttttttttttctgcagca

SEQ ID NO: 8503 - DNA, 23 bp, Artificial Sequence
  Synthetic
ccgttttttttttttctgcagca

SEQ ID NO: 8504 - DNA, 23 bp, Artificial Sequence
  Synthetic
ccgttttttttttttatgcagca

SEQ ID NO: 8505 - DNA, 23 bp, Artificial Sequence
  Synthetic
ccgttttttttttttgtgatttc

SEQ ID NO: 8506 - DNA, 23 bp, Artificial Sequence
  Synthetic
ccgttttttttttttgggagctc

SEQ ID NO: 8507 - DNA, 23 bp, Artificial Sequence
  Synthetic
ccgttttttttttttgggagctc

SEQ ID NO: 8508 - DNA, 23 bp, Artificial Sequence
  Synthetic
ccgttttttttttttaggagctc

SEQ ID NO: 8509 - DNA, 23 bp, Artificial Sequence
  Synthetic
ccgttttttttttttggcgctat

SEQ ID NO: 8510 - DNA, 23 bp, Artificial Sequence
  Synthetic
ccgttttttttttttggcgctat

SEQ ID NO: 8511 - DNA, 23 bp, Artificial Sequence
  Synthetic
ccgttttttttttttggcgctat

SEQ ID NO: 8512 - DNA, 23 bp, Artificial Sequence
  Synthetic
ccgttttttttttttgatcaatg

SEQ ID NO: 8513 - DNA, 23 bp, Artificial Sequence
  Synthetic
ccgttttttttttttgatcaatg

SEQ ID NO: 8514 - DNA, 23 bp, Artificial Sequence
  Synthetic
ccgttttttttttttggaggtgg

SEQ ID NO: 8515 - DNA, 23 bp, Artificial Sequence
  Synthetic
ccgttttttttttttggaggtgg

SEQ ID NO: 8516 - DNA, 23 bp, Artificial Sequence
  Synthetic
ccgttttttttttttgagttccc

SEQ ID NO: 8517 - DNA, 23 bp, Artificial Sequence
  Synthetic
ccgttttttttttttgagtcccc

SEQ ID NO: 8518 - DNA, 23 bp, Artificial Sequence
  Synthetic
ccgttttttttttttgagtcccc

SEQ ID NO: 8519 - DNA, 23 bp, Artificial Sequence
  Synthetic
ccgttttttttttttgagttccc

SEQ ID NO: 8520 - DNA, 23 bp, Artificial Sequence
  Synthetic
ccgttttttttttttgagttccc

SEQ ID NO: 8521 - DNA, 23 bp, Artificial Sequence
  Synthetic
ccgttttttttttttgagtcccc

SEQ ID NO: 8522 - DNA, 23 bp, Artificial Sequence
  Synthetic
ccgttttttttttttcagttcaa

SEQ ID NO: 8523 - DNA, 23 bp, Artificial Sequence
  Synthetic
ccgttttttttttttaagttcaa

SEQ ID NO: 8524 - DNA, 23 bp, Artificial Sequence
  Synthetic
ccgttttttttttttcatcaacg

SEQ ID NO: 8525 - DNA, 23 bp, Artificial Sequence
  Synthetic
ccgttttttttttttcatcaacg

SEQ ID NO: 8526 - DNA, 23 bp, Artificial Sequence
  Synthetic
ccgttttttttttttaaggggtg

SEQ ID NO: 8527 - DNA, 23 bp, Artificial Sequence
  Synthetic
ccgttttttttttttcaggggtg

SEQ ID NO: 8528 - DNA, 23 bp, Artificial Sequence
  Synthetic
ccgttttttttttttcaggggtg

SEQ ID NO: 8529 - DNA, 23 bp, Artificial Sequence
  Synthetic
ccgttttttttttttcagggcaa

SEQ ID NO: 8530 - DNA, 23 bp, Artificial Sequence
  Synthetic
ccgttttttttttttcagggcaa

SEQ ID NO: 8531 - DNA, 23 bp, Artificial Sequence
  Synthetic
ccgttttttttttttcagggcaa

SEQ ID NO: 8532 - DNA, 23 bp, Artificial Sequence
  Synthetic
ccgttttttttttttcggggcaa

SEQ ID NO: 8533 - DNA, 23 bp, Artificial Sequence
  Synthetic
ccgttttttttttttcgaggcaa

SEQ ID NO: 8534 - DNA, 23 bp, Artificial Sequence
  Synthetic
ccgttttttttttttccgggcaa

SEQ ID NO: 8535 - DNA, 23 bp, Artificial Sequence
  Synthetic
ccgttttttttttttgtgactta

SEQ ID NO: 8536 - DNA, 23 bp, Artificial Sequence
  Synthetic
ccgttttttttttttgtcggtcg

SEQ ID NO: 8537 - DNA, 23 bp, Artificial Sequence
  Synthetic
ccgttttttttttttcagaggtt

SEQ ID NO: 8538 - DNA, 23 bp, Artificial Sequence
  Synthetic
ccgttttttttttttcgagtttg

SEQ ID NO: 8539 - DNA, 23 bp, Artificial Sequence
  Synthetic
ccgttttttttttttgctgccgc

SEQ ID NO: 8540 - DNA, 23 bp, Artificial Sequence
  Synthetic
ccgttttttttttttagttatgg

SEQ ID NO: 8541 - DNA, 23 bp, Artificial Sequence
  Synthetic
ccgttttttttttttagttatgg

SEQ ID NO: 8542 - DNA, 23 bp, Artificial Sequence
  Synthetic
ccgttttttttttttagttatgg

SEQ ID NO: 8543 - DNA, 23 bp, Artificial Sequence
  Synthetic
ccgttttttttttttctggatta

SEQ ID NO: 8544 - DNA, 23 bp, Artificial Sequence
  Synthetic
ccgttttttttttttaccaaaag

SEQ ID NO: 8545 - DNA, 23 bp, Artificial Sequence
  Synthetic
ccgttttttttttttgccaggga

SEQ ID NO: 8546 - DNA, 23 bp, Artificial Sequence
  Synthetic
ccgttttttttttttgtgcagaa

SEQ ID NO: 8547 - DNA, 23 bp, Artificial Sequence
  Synthetic
ccgttttttttttttgacgatga

SEQ ID NO: 8548 - DNA, 23 bp, Artificial Sequence
  Synthetic
ccgttttttttttttatgttctg

SEQ ID NO: 8549 - DNA, 23 bp, Artificial Sequence
  Synthetic
ccgttttttttttttgaacagtg

SEQ ID NO: 8550 - DNA, 23 bp, Artificial Sequence
  Synthetic
ccgttttttttttttcgaacaaa

SEQ ID NO: 8551 - DNA, 23 bp, Artificial Sequence
  Synthetic
ccgttttttttttttggtcagtt

SEQ ID NO: 8552 - DNA, 23 bp, Artificial Sequence
  Synthetic
ccgttttttttttttcaacatcc

SEQ ID NO: 8553 - DNA, 23 bp, Artificial Sequence
  Synthetic
ccgttttttttttttgcatttcc

SEQ ID NO: 8554 - DNA, 23 bp, Artificial Sequence
  Synthetic
ccgttttttttttttcgtaagga

SEQ ID NO: 8555 - DNA, 23 bp, Artificial Sequence
  Synthetic
ccgttttttttttttcaacaaaa

SEQ ID NO: 8556 - DNA, 23 bp, Artificial Sequence
  Synthetic
ccgttttttttttttcaacaaaa

SEQ ID NO: 8557 - DNA, 23 bp, Artificial Sequence
  Synthetic
ccgttttttttttttcaacaaaa

SEQ ID NO: 8558 - DNA, 23 bp, Artificial Sequence
  Synthetic
ccgttttttttttttgagggcta

SEQ ID NO: 8559 - DNA, 23 bp, Artificial Sequence
  Synthetic
ccgttttttttttttgtatgggc

SEQ ID NO: 8560 - DNA, 23 bp, Artificial Sequence
  Synthetic
ccgttttttttttttgagacaaa

SEQ ID NO: 8561 - DNA, 23 bp, Artificial Sequence
  Synthetic
ccgttttttttttttgatggcca

SEQ ID NO: 8562 - DNA, 23 bp, Artificial Sequence
  Synthetic
ccgttttttttttttggcactgc

SEQ ID NO: 8563 - DNA, 23 bp, Artificial Sequence
  Synthetic
ccgttttttttttttaacatcaa

SEQ ID NO: 8564 - DNA, 23 bp, Artificial Sequence
  Synthetic
ccgttttttttttttagcaacga

SEQ ID NO: 8565 - DNA, 23 bp, Artificial Sequence
  Synthetic
ccgttttttttttttcggtgtac

SEQ ID NO: 8566 - DNA, 23 bp, Artificial Sequence
  Synthetic
ccgttttttttttttatgagcag

SEQ ID NO: 8567 - DNA, 23 bp, Artificial Sequence
  Synthetic
ccgttttttttttttgccagata

SEQ ID NO: 8568 - DNA, 23 bp, Artificial Sequence
  Synthetic
ccgttttttttttttaagtatcc

SEQ ID NO: 8569 - DNA, 23 bp, Artificial Sequence
  Synthetic
ccgttttttttttttaagaacat

SEQ ID NO: 8570 - DNA, 23 bp, Artificial Sequence
  Synthetic
ccgttttttttttttgaacatga

SEQ ID NO: 8571 - DNA, 23 bp, Artificial Sequence
  Synthetic
ccgttttttttttttactataca

SEQ ID NO: 8572 - DNA, 23 bp, Artificial Sequence
  Synthetic
ccgttttttttttttctccatac

SEQ ID NO: 8573 - DNA, 23 bp, Artificial Sequence
  Synthetic
ccgttttttttttttacaaattc

SEQ ID NO: 8574 - DNA, 23 bp, Artificial Sequence
  Synthetic
ccgttttttttttttcttggcat

SEQ ID NO: 8575 - DNA, 23 bp, Artificial Sequence
  Synthetic
ccgttttttttttttaggagaga

SEQ ID NO: 8576 - DNA, 23 bp, Artificial Sequence
  Synthetic
ccgttttttttttttgtgaattc

SEQ ID NO: 8577 - DNA, 23 bp, Artificial Sequence
  Synthetic
ccgttttttttttttgtgaattc

SEQ ID NO: 8578 - DNA, 23 bp, Artificial Sequence
  Synthetic
ccgttttttttttttcgcgcgct

SEQ ID NO: 8579 - DNA, 23 bp, Artificial Sequence
  Synthetic
ccgttttttttttttcgtaggaa

SEQ ID NO: 8580 - DNA, 23 bp, Artificial Sequence
  Synthetic
ccgttttttttttttgtcgtacc

SEQ ID NO: 8581 - DNA, 23 bp, Artificial Sequence
  Synthetic
ccgttttttttttttatgagtgt

SEQ ID NO: 8582 - DNA, 23 bp, Artificial Sequence
  Synthetic
ccgttttttttttttacagacaa

SEQ ID NO: 8583 - DNA, 23 bp, Artificial Sequence
  Synthetic
ccgttttttttttttagaattac

SEQ ID NO: 8584 - DNA, 23 bp, Artificial Sequence
  Synthetic
ccgttttttttttttcagagcac

SEQ ID NO: 8585 - DNA, 23 bp, Artificial Sequence
  Synthetic
ccgttttttttttttctcactca

SEQ ID NO: 8586 - DNA, 23 bp, Artificial Sequence
  Synthetic
ccgttttttttttttcagctatg

SEQ ID NO: 8587 - DNA, 23 bp, Artificial Sequence
  Synthetic
ccgttttttttttttcaaccagc

SEQ ID NO: 8588 - DNA, 23 bp, Artificial Sequence
  Synthetic
ccgttttttttttttacaacaaa

SEQ ID NO: 8589 - DNA, 23 bp, Artificial Sequence
  Synthetic
ccgttttttttttttcactaccc

SEQ ID NO: 8590 - DNA, 23 bp, Artificial Sequence
  Synthetic
ccgttttttttttttgacatctt

SEQ ID NO: 8591 - DNA, 23 bp, Artificial Sequence
  Synthetic
ccgttttttttttttcatacagc

SEQ ID NO: 8592 - DNA, 23 bp, Artificial Sequence
  Synthetic
ccgttttttttttttaactatac

SEQ ID NO: 8593 - DNA, 23 bp, Artificial Sequence
  Synthetic
ccgttttttttttttaactatgc

SEQ ID NO: 8594 - DNA, 23 bp, Artificial Sequence
  Synthetic
ccgttttttttttttaactatac

SEQ ID NO: 8595 - DNA, 23 bp, Artificial Sequence
  Synthetic
ccgttttttttttttaactgtac

SEQ ID NO: 8596 - DNA, 23 bp, Artificial Sequence
  Synthetic
ccgttttttttttttaacagcac

SEQ ID NO: 8597 - DNA, 23 bp, Artificial Sequence
  Synthetic
ccgttttttttttttcagttatc

SEQ ID NO: 8598 - DNA, 23 bp, Artificial Sequence
  Synthetic
ccgttttttttttttcatagccc

SEQ ID NO: 8599 - DNA, 23 bp, Artificial Sequence
  Synthetic
ccgttttttttttttacctgcac

SEQ ID NO: 8600 - DNA, 23 bp, Artificial Sequence
  Synthetic
ccgttttttttttttgatagccc

SEQ ID NO: 8601 - DNA, 23 bp, Artificial Sequence
  Synthetic
ccgttttttttttttcacaaatt

SEQ ID NO: 8602 - DNA, 23 bp, Artificial Sequence
  Synthetic
ccgttttttttttttcacaaatt

SEQ ID NO: 8603 - DNA, 23 bp, Artificial Sequence
  Synthetic
ccgttttttttttttcaaacacc

SEQ ID NO: 8604 - DNA, 23 bp, Artificial Sequence
  Synthetic
ccgttttttttttttggcattca

SEQ ID NO: 8605 - DNA, 23 bp, Artificial Sequence
  Synthetic
ccgttttttttttttcacaggtt

SEQ ID NO: 8606 - DNA, 23 bp, Artificial Sequence
  Synthetic
ccgttttttttttttcacaagtt

SEQ ID NO: 8607 - DNA, 23 bp, Artificial Sequence
  Synthetic
ccgttttttttttttcgcattat

SEQ ID NO: 8608 - DNA, 23 bp, Artificial Sequence
  Synthetic
ccgttttttttttttagccaagc

SEQ ID NO: 8609 - DNA, 23 bp, Artificial Sequence
  Synthetic
ccgttttttttttttaaaagaga

SEQ ID NO: 8610 - DNA, 23 bp, Artificial Sequence
  Synthetic
ccgttttttttttttcgaccatg

SEQ ID NO: 8611 - DNA, 23 bp, Artificial Sequence
  Synthetic
ccgttttttttttttcggcctga

SEQ ID NO: 8612 - DNA, 23 bp, Artificial Sequence
  Synthetic
ccgttttttttttttactggaga

SEQ ID NO: 8613 - DNA, 23 bp, Artificial Sequence
  Synthetic
ccgttttttttttttccgtggtt

SEQ ID NO: 8614 - DNA, 23 bp, Artificial Sequence
  Synthetic
ccgttttttttttttgtagtgct

SEQ ID NO: 8615 - DNA, 23 bp, Artificial Sequence
  Synthetic
ccgttttttttttttcatccata

SEQ ID NO: 8616 - DNA, 23 bp, Artificial Sequence
  Synthetic
ccgttttttttttttagggattc

SEQ ID NO: 8617 - DNA, 23 bp, Artificial Sequence
  Synthetic
ccgttttttttttttacaaagtt

SEQ ID NO: 8618 - DNA, 23 bp, Artificial Sequence
  Synthetic
ccgttttttttttttacaaagtt

SEQ ID NO: 8619 - DNA, 23 bp, Artificial Sequence
  Synthetic
ccgttttttttttttacactggt

SEQ ID NO: 8620 - DNA, 23 bp, Artificial Sequence
  Synthetic
ccgttttttttttttcctcaagg

SEQ ID NO: 8621 - DNA, 23 bp, Artificial Sequence
  Synthetic
ccgttttttttttttactagact

SEQ ID NO: 8622 - DNA, 23 bp, Artificial Sequence
  Synthetic
ccgttttttttttttgtaaacca

SEQ ID NO: 8623 - DNA, 23 bp, Artificial Sequence
  Synthetic
ccgttttttttttttgccaatat

SEQ ID NO: 8624 - DNA, 23 bp, Artificial Sequence
  Synthetic
ccgttttttttttttacaagtgc

SEQ ID NO: 8625 - DNA, 23 bp, Artificial Sequence
  Synthetic
ccgttttttttttttactacctg

SEQ ID NO: 8626 - DNA, 23 bp, Artificial Sequence
  Synthetic
ccgttttttttttttaactcacc

SEQ ID NO: 8627 - DNA, 23 bp, Artificial Sequence
  Synthetic
ccgttttttttttttaaacccac

SEQ ID NO: 8628 - DNA, 23 bp, Artificial Sequence
  Synthetic
ccgttttttttttttaaactcac

SEQ ID NO: 8629 - DNA, 23 bp, Artificial Sequence
  Synthetic
ccgttttttttttttagcccaaa

SEQ ID NO: 8630 - DNA, 23 bp, Artificial Sequence
  Synthetic
ccgttttttttttttatctgcac

SEQ ID NO: 8631 - DNA, 23 bp, Artificial Sequence
  Synthetic
ccgttttttttttttaactgcac

SEQ ID NO: 8632 - DNA, 23 bp, Artificial Sequence
  Synthetic
ccgttttttttttttcagctgct

SEQ ID NO: 8633 - DNA, 23 bp, Artificial Sequence
  Synthetic
ccgttttttttttttctggctgt

SEQ ID NO: 8634 - DNA, 23 bp, Artificial Sequence
  Synthetic
ccgttttttttttttactgggac

SEQ ID NO: 8635 - DNA, 23 bp, Artificial Sequence
  Synthetic
ccgttttttttttttcatctcgc

SEQ ID NO: 8636 - DNA, 23 bp, Artificial Sequence
  Synthetic
ccgttttttttttttaacaggta

SEQ ID NO: 8637 - DNA, 23 bp, Artificial Sequence
  Synthetic
ccgttttttttttttaaccaatg

SEQ ID NO: 8638 - DNA, 23 bp, Artificial Sequence
  Synthetic
ccgttttttttttttgaacagat

SEQ ID NO: 8639 - DNA, 23 bp, Artificial Sequence
  Synthetic
ccgttttttttttttaacatcgt

SEQ ID NO: 8640 - DNA, 23 bp, Artificial Sequence
  Synthetic
ccgttttttttttttcatcatta

SEQ ID NO: 8641 - DNA, 23 bp, Artificial Sequence
  Synthetic
ccgttttttttttttccatcatt

SEQ ID NO: 8642 - DNA, 23 bp, Artificial Sequence
  Synthetic
ccgttttttttttttcagactcc

SEQ ID NO: 8643 - DNA, 23 bp, Artificial Sequence
  Synthetic
ccgttttttttttttctacctgc

SEQ ID NO: 8644 - DNA, 23 bp, Artificial Sequence
  Synthetic
ccgttttttttttttacctgcac

SEQ ID NO: 8645 - DNA, 23 bp, Artificial Sequence
  Synthetic
ccgttttttttttttagtcaaca

SEQ ID NO: 8646 - DNA, 23 bp, Artificial Sequence
  Synthetic
ccgttttttttttttagacagcc

SEQ ID NO: 8647 - DNA, 23 bp, Artificial Sequence
  Synthetic
ccgttttttttttttcagccgct

SEQ ID NO: 8648 - DNA, 23 bp, Artificial Sequence
  Synthetic
ccgttttttttttttactgcctg

SEQ ID NO: 8649 - DNA, 23 bp, Artificial Sequence
  Synthetic
ccgttttttttttttgtctgtca

SEQ ID NO: 8650 - DNA, 23 bp, Artificial Sequence
  Synthetic
ccgttttttttttttacatggtt

SEQ ID NO: 8651 - DNA, 23 bp, Artificial Sequence
  Synthetic
ccgttttttttttttaaagcttg

SEQ ID NO: 8652 - DNA, 23 bp, Artificial Sequence
  Synthetic
ccgttttttttttttaaacccag

SEQ ID NO: 8653 - DNA, 23 bp, Artificial Sequence
  Synthetic
ccgttttttttttttacccagta

SEQ ID NO: 8654 - DNA, 23 bp, Artificial Sequence
  Synthetic
ccgttttttttttttggaaatcc

SEQ ID NO: 8655 - DNA, 23 bp, Artificial Sequence
  Synthetic
ccgttttttttttttgtggtaat

SEQ ID NO: 8656 - DNA, 23 bp, Artificial Sequence
  Synthetic
ccgttttttttttttctgttcct

SEQ ID NO: 8657 - DNA, 23 bp, Artificial Sequence
  Synthetic
ccgttttttttttttcagaccga

SEQ ID NO: 8658 - DNA, 23 bp, Artificial Sequence
  Synthetic
ccgttttttttttttagcctatc

SEQ ID NO: 8659 - DNA, 23 bp, Artificial Sequence
  Synthetic
ccgttttttttttttaacctatc

SEQ ID NO: 8660 - DNA, 23 bp, Artificial Sequence
  Synthetic
ccgttttttttttttcggaactt

SEQ ID NO: 8661 - DNA, 23 bp, Artificial Sequence
  Synthetic
ccgttttttttttttgcagaact

SEQ ID NO: 8662 - DNA, 23 bp, Artificial Sequence
  Synthetic
ccgttttttttttttaaccgatt

SEQ ID NO: 8663 - DNA, 23 bp, Artificial Sequence
  Synthetic
ccgttttttttttttaaacactg

SEQ ID NO: 8664 - DNA, 23 bp, Artificial Sequence
  Synthetic
ccgttttttttttttaaccgatt

SEQ ID NO: 8665 - DNA, 23 bp, Artificial Sequence
  Synthetic
ccgttttttttttttagcttcca

SEQ ID NO: 8666 - DNA, 23 bp, Artificial Sequence
  Synthetic
ccgttttttttttttagctgagt

SEQ ID NO: 8667 - DNA, 23 bp, Artificial Sequence
  Synthetic
ccgttttttttttttgctgagag

SEQ ID NO: 8668 - DNA, 23 bp, Artificial Sequence
  Synthetic
ccgttttttttttttagcttcca

SEQ ID NO: 8669 - DNA, 23 bp, Artificial Sequence
  Synthetic
ccgttttttttttttagcttcca

SEQ ID NO: 8670 - DNA, 23 bp, Artificial Sequence
  Synthetic
ccgttttttttttttagctatgc

SEQ ID NO: 8671 - DNA, 23 bp, Artificial Sequence
  Synthetic
ccgttttttttttttcgccctct

SEQ ID NO: 8672 - DNA, 23 bp, Artificial Sequence
  Synthetic
ccgttttttttttttagatgggt

SEQ ID NO: 8673 - DNA, 23 bp, Artificial Sequence
  Synthetic
ccgttttttttttttagcactgg

SEQ ID NO: 8674 - DNA, 23 bp, Artificial Sequence
  Synthetic
ccgttttttttttttcaatcagc

SEQ ID NO: 8675 - DNA, 23 bp, Artificial Sequence
  Synthetic
ccgttttttttttttcaatcagc

SEQ ID NO: 8676 - DNA, 23 bp, Artificial Sequence
  Synthetic
ccgttttttttttttgtacccct

SEQ ID NO: 8677 - DNA, 23 bp, Artificial Sequence
  Synthetic
ccgttttttttttttcgcagatg

SEQ ID NO: 8678 - DNA, 23 bp, Artificial Sequence
  Synthetic
ccgttttttttttttaaagatca

SEQ ID NO: 8679 - DNA, 23 bp, Artificial Sequence
  Synthetic
ccgttttttttttttgcgaatat

SEQ ID NO: 8680 - DNA, 23 bp, Artificial Sequence
  Synthetic
ccgttttttttttttagacgtgg

SEQ ID NO: 8681 - DNA, 23 bp, Artificial Sequence
  Synthetic
ccgttttttttttttgcgcatgt

SEQ ID NO: 8682 - DNA, 23 bp, Artificial Sequence
  Synthetic
ccgttttttttttttactgaggg

SEQ ID NO: 8683 - DNA, 23 bp, Artificial Sequence
  Synthetic
ccgttttttttttttgggcggac

SEQ ID NO: 8684 - DNA, 23 bp, Artificial Sequence
  Synthetic
ccgttttttttttttcaacggga

SEQ ID NO: 8685 - DNA, 23 bp, Artificial Sequence
  Synthetic
ccgttttttttttttatattagg

SEQ ID NO: 8686 - DNA, 23 bp, Artificial Sequence
  Synthetic
ccgttttttttttttgatgtagt

SEQ ID NO: 8687 - DNA, 23 bp, Artificial Sequence
  Synthetic
ccgttttttttttttagtgtata

SEQ ID NO: 8688 - DNA, 23 bp, Artificial Sequence
  Synthetic
ccgttttttttttttatcgggag

SEQ ID NO: 8689 - DNA, 23 bp, Artificial Sequence
  Synthetic
ccgttttttttttttactggatg

SEQ ID NO: 8690 - DNA, 23 bp, Artificial Sequence
  Synthetic
ccgttttttttttttaagtggat

SEQ ID NO: 8691 - DNA, 23 bp, Artificial Sequence
  Synthetic
ccgttttttttttttaaacatca

SEQ ID NO: 8692 - DNA, 23 bp, Artificial Sequence
  Synthetic
ccgttttttttttttacggtcct

SEQ ID NO: 8693 - DNA, 23 bp, Artificial Sequence
  Synthetic
ccgttttttttttttcatccaat

SEQ ID NO: 8694 - DNA, 23 bp, Artificial Sequence
  Synthetic
ccgttttttttttttcacacaat

SEQ ID NO: 8695 - DNA, 23 bp, Artificial Sequence
  Synthetic
ccgttttttttttttaacaacaa

SEQ ID NO: 8696 - DNA, 23 bp, Artificial Sequence
  Synthetic
ccgttttttttttttacaggccg

SEQ ID NO: 8697 - DNA, 23 bp, Artificial Sequence
  Synthetic
ccgttttttttttttacctgcac

SEQ ID NO: 8698 - DNA, 23 bp, Artificial Sequence
  Synthetic
ccgttttttttttttaacaatac

SEQ ID NO: 8699 - DNA, 23 bp, Artificial Sequence
  Synthetic
ccgttttttttttttacaagatc

SEQ ID NO: 8700 - DNA, 23 bp, Artificial Sequence
  Synthetic
ccgttttttttttttaactatac

SEQ ID NO: 8701 - DNA, 23 bp, Artificial Sequence
  Synthetic
ccgttttttttttttcacacttg

SEQ ID NO: 8702 - DNA, 23 bp, Artificial Sequence
  Synthetic
ccgttttttttttttcggaatgc

SEQ ID NO: 8703 - DNA, 23 bp, Artificial Sequence
  Synthetic
ccgttttttttttttacatactt

SEQ ID NO: 8704 - DNA, 23 bp, Artificial Sequence
  Synthetic
ccgttttttttttttggcattca

SEQ ID NO: 8705 - DNA, 23 bp, Artificial Sequence
  Synthetic
ccgttttttttttttccgtgaat

SEQ ID NO: 8706 - DNA, 23 bp, Artificial Sequence
  Synthetic
ccgttttttttttttcctggtcg

SEQ ID NO: 8707 - DNA, 23 bp, Artificial Sequence
  Synthetic
ccgttttttttttttcctgcctg

SEQ ID NO: 8708 - DNA, 23 bp, Artificial Sequence
  Synthetic
ccgttttttttttttcaccgcag

SEQ ID NO: 8709 - DNA, 23 bp, Artificial Sequence
  Synthetic
ccgttttttttttttcccgcaca

SEQ ID NO: 8710 - DNA, 23 bp, Artificial Sequence
  Synthetic
ccgttttttttttttaagggtat

SEQ ID NO: 8711 - DNA, 23 bp, Artificial Sequence
  Synthetic
ccgttttttttttttagcgtcat

SEQ ID NO: 8712 - DNA, 23 bp, Artificial Sequence
  Synthetic
ccgttttttttttttccagtacc

SEQ ID NO: 8713 - DNA, 23 bp, Artificial Sequence
  Synthetic
ccgttttttttttttcagtactt

SEQ ID NO: 8714 - DNA, 23 bp, Artificial Sequence
  Synthetic
ccgttttttttttttagcgaaaa

SEQ ID NO: 8715 - DNA, 23 bp, Artificial Sequence
  Synthetic
ccgttttttttttttcatttctc

SEQ ID NO: 8716 - DNA, 23 bp, Artificial Sequence
  Synthetic
ccgttttttttttttcataccac

SEQ ID NO: 8717 - DNA, 23 bp, Artificial Sequence
  Synthetic
ccgttttttttttttgagctact

SEQ ID NO: 8718 - DNA, 23 bp, Artificial Sequence
  Synthetic
ccgttttttttttttagctccta

SEQ ID NO: 8719 - DNA, 23 bp, Artificial Sequence
  Synthetic
ccgttttttttttttgagcgtta

SEQ ID NO: 8720 - DNA, 23 bp, Artificial Sequence
  Synthetic
ccgttttttttttttgcaacact

SEQ ID NO: 8721 - DNA, 23 bp, Artificial Sequence
  Synthetic
ccgttttttttttttccgtgcca

SEQ ID NO: 8722 - DNA, 23 bp, Artificial Sequence
  Synthetic
ccgttttttttttttaataagag

SEQ ID NO: 8723 - DNA, 23 bp, Artificial Sequence
  Synthetic
ccgttttttttttttgttacctg

SEQ ID NO: 8724 - DNA, 23 bp, Artificial Sequence
  Synthetic
ccgttttttttttttagttagtg

SEQ ID NO: 8725 - DNA, 23 bp, Artificial Sequence
  Synthetic
ccgttttttttttttatacagtt

SEQ ID NO: 8726 - DNA, 23 bp, Artificial Sequence
  Synthetic
ccgttttttttttttaaccagat

SEQ ID NO: 8727 - DNA, 23 bp, Artificial Sequence
  Synthetic
ccgttttttttttttaccaaaac

SEQ ID NO: 8728 - DNA, 23 bp, Artificial Sequence
  Synthetic
ccgttttttttttttcaaccagc

SEQ ID NO: 8729 - DNA, 23 bp, Artificial Sequence
  Synthetic
ccgttttttttttttcttgcaag

SEQ ID NO: 8730 - DNA, 23 bp, Artificial Sequence
  Synthetic
ccgttttttttttttgataccaa

SEQ ID NO: 8731 - DNA, 23 bp, Artificial Sequence
  Synthetic
ccgttttttttttttaggagcag

SEQ ID NO: 8732 - DNA, 23 bp, Artificial Sequence
  Synthetic
ccgttttttttttttcatagctc

SEQ ID NO: 8733 - DNA, 23 bp, Artificial Sequence
  Synthetic
ccgttttttttttttggatttgt

SEQ ID NO: 8734 - DNA, 23 bp, Artificial Sequence
  Synthetic
ccgttttttttttttccgtcaat

SEQ ID NO: 8735 - DNA, 23 bp, Artificial Sequence
  Synthetic
ccgttttttttttttccacgact

SEQ ID NO: 8736 - DNA, 23 bp, Artificial Sequence
  Synthetic
ccgttttttttttttattgcgaa

SEQ ID NO: 8737 - DNA, 23 bp, Artificial Sequence
  Synthetic
ccgttttttttttttgtgaacgg

SEQ ID NO: 8738 - DNA, 23 bp, Artificial Sequence
  Synthetic
ccgttttttttttttataccagg

SEQ ID NO: 8739 - DNA, 23 bp, Artificial Sequence
  Synthetic
ccgttttttttttttctaaccgt

SEQ ID NO: 8740 - DNA, 23 bp, Artificial Sequence
  Synthetic
ccgttttttttttttctagctga

SEQ ID NO: 8741 - DNA, 23 bp, Artificial Sequence
  Synthetic
ccgttttttttttttgggagttt

SEQ ID NO: 8742 - DNA, 23 bp, Artificial Sequence
  Synthetic
ccgttttttttttttctgtagat

SEQ ID NO: 8743 - DNA, 23 bp, Artificial Sequence
  Synthetic
ccgttttttttttttgcgacagc

SEQ ID NO: 8744 - DNA, 23 bp, Artificial Sequence
  Synthetic
ccgttttttttttttagctgaat

SEQ ID NO: 8745 - DNA, 23 bp, Artificial Sequence
  Synthetic
ccgttttttttttttagctgaat

SEQ ID NO: 8746 - DNA, 23 bp, Artificial Sequence
  Synthetic
ccgttttttttttttgaagagag

SEQ ID NO: 8747 - DNA, 23 bp, Artificial Sequence
  Synthetic
ccgttttttttttttgaagagag

SEQ ID NO: 8748 - DNA, 23 bp, Artificial Sequence
  Synthetic
ccgttttttttttttcgcatcta

SEQ ID NO: 8749 - DNA, 23 bp, Artificial Sequence
  Synthetic
ccgttttttttttttctgcagct

SEQ ID NO: 8750 - DNA, 23 bp, Artificial Sequence
  Synthetic
ccgttttttttttttaacccaag

SEQ ID NO: 8751 - DNA, 23 bp, Artificial Sequence
  Synthetic
ccgttttttttttttaacatggc

SEQ ID NO: 8752 - DNA, 23 bp, Artificial Sequence
  Synthetic
ccgttttttttttttagcacgga

SEQ ID NO: 8753 - DNA, 23 bp, Artificial Sequence
  Synthetic
ccgttttttttttttctcggcag

SEQ ID NO: 8754 - DNA, 23 bp, Artificial Sequence
  Synthetic
ccgttttttttttttacacacag

SEQ ID NO: 8755 - DNA, 23 bp, Artificial Sequence
  Synthetic
ccgttttttttttttattgccgt

SEQ ID NO: 8756 - DNA, 23 bp, Artificial Sequence
  Synthetic
ccgttttttttttttggactaga

SEQ ID NO: 8757 - DNA, 23 bp, Artificial Sequence
  Synthetic
ccgttttttttttttgagcagag

SEQ ID NO: 8758 - DNA, 23 bp, Artificial Sequence
  Synthetic
ccgttttttttttttctgtaagc

SEQ ID NO: 8759 - DNA, 23 bp, Artificial Sequence
  Synthetic
ccgttttttttttttccgtacac

SEQ ID NO: 8760 - DNA, 23 bp, Artificial Sequence
  Synthetic
ccgttttttttttttctactctt

SEQ ID NO: 8761 - DNA, 23 bp, Artificial Sequence
  Synthetic
ccgttttttttttttctgggaac

SEQ ID NO: 8762 - DNA, 23 bp, Artificial Sequence
  Synthetic
ccgttttttttttttcactaccc

SEQ ID NO: 8763 - DNA, 23 bp, Artificial Sequence
  Synthetic
ccgttttttttttttgctatgcc

SEQ ID NO: 8764 - DNA, 23 bp, Artificial Sequence
  Synthetic
ccgttttttttttttactgaact

SEQ ID NO: 8765 - DNA, 23 bp, Artificial Sequence
  Synthetic
ccgttttttttttttctagactg

SEQ ID NO: 8766 - DNA, 23 bp, Artificial Sequence
  Synthetic
ccgttttttttttttgaaggcgg

SEQ ID NO: 8767 - DNA, 23 bp, Artificial Sequence
  Synthetic
ccgttttttttttttggacagct

SEQ ID NO: 8768 - DNA, 23 bp, Artificial Sequence
  Synthetic
ccgttttttttttttagctttgg

SEQ ID NO: 8769 - DNA, 23 bp, Artificial Sequence
  Synthetic
ccgttttttttttttcggctttc

SEQ ID NO: 8770 - DNA, 23 bp, Artificial Sequence
  Synthetic
ccgttttttttttttactagctt

SEQ ID NO: 8771 - DNA, 23 bp, Artificial Sequence
  Synthetic
ccgttttttttttttactggctt

SEQ ID NO: 8772 - DNA, 23 bp, Artificial Sequence
  Synthetic
ccgttttttttttttacactgaa

SEQ ID NO: 8773 - DNA, 23 bp, Artificial Sequence
  Synthetic
ccgttttttttttttgacagcat

SEQ ID NO: 8774 - DNA, 23 bp, Artificial Sequence
  Synthetic
ccgttttttttttttgcacgcct

SEQ ID NO: 8775 - DNA, 23 bp, Artificial Sequence
  Synthetic
ccgttttttttttttgactgtgg

SEQ ID NO: 8776 - DNA, 23 bp, Artificial Sequence
  Synthetic
ccgttttttttttttacacctga

SEQ ID NO: 8777 - DNA, 23 bp, Artificial Sequence
  Synthetic
ccgttttttttttttggggcatt

SEQ ID NO: 8778 - DNA, 23 bp, Artificial Sequence
  Synthetic
ccgttttttttttttaactatac

SEQ ID NO: 8779 - DNA, 23 bp, Artificial Sequence
  Synthetic
ccgttttttttttttcacacttg

SEQ ID NO: 8780 - DNA, 23 bp, Artificial Sequence
  Synthetic
ccgttttttttttttcgaaatgc

SEQ ID NO: 8781 - DNA, 23 bp, Artificial Sequence
  Synthetic
ccgttttttttttttacatactt

SEQ ID NO: 8782 - DNA, 23 bp, Artificial Sequence
  Synthetic
ccgttttttttttttggcattca

SEQ ID NO: 8783 - DNA, 23 bp, Artificial Sequence
  Synthetic
ccgttttttttttttgcacatca

SEQ ID NO: 8784 - DNA, 23 bp, Artificial Sequence
  Synthetic
ccgttttttttttttgttcagaa

SEQ ID NO: 8785 - DNA, 23 bp, Artificial Sequence
  Synthetic
ccgttttttttttttccgtgaat

SEQ ID NO: 8786 - DNA, 23 bp, Artificial Sequence
  Synthetic
ccgttttttttttttacgatgga

SEQ ID NO: 8787 - DNA, 23 bp, Artificial Sequence
  Synthetic
ccgttttttttttttctcctggt

SEQ ID NO: 8788 - DNA, 23 bp, Artificial Sequence
  Synthetic
ccgttttttttttttctgcctgt

SEQ ID NO: 8789 - DNA, 23 bp, Artificial Sequence
  Synthetic
ccgttttttttttttcaccgcag

SEQ ID NO: 8790 - DNA, 23 bp, Artificial Sequence
  Synthetic
ccgttttttttttttcccgcaca

SEQ ID NO: 8791 - DNA, 23 bp, Artificial Sequence
  Synthetic
ccgttttttttttttaagggtat

SEQ ID NO: 8792 - DNA, 23 bp, Artificial Sequence
  Synthetic
ccgttttttttttttcaggccgg

SEQ ID NO: 8793 - DNA, 23 bp, Artificial Sequence
  Synthetic
ccgttttttttttttagcgtcat

SEQ ID NO: 8794 - DNA, 23 bp, Artificial Sequence
  Synthetic
ccgttttttttttttaagctgtt

SEQ ID NO: 8795 - DNA, 23 bp, Artificial Sequence
  Synthetic
ccgttttttttttttctgaatgg

SEQ ID NO: 8796 - DNA, 23 bp, Artificial Sequence
  Synthetic
ccgttttttttttttccagtacc

SEQ ID NO: 8797 - DNA, 23 bp, Artificial Sequence
  Synthetic
ccgttttttttttttcagtactt

SEQ ID NO: 8798 - DNA, 23 bp, Artificial Sequence
  Synthetic
ccgttttttttttttagcgaaga

SEQ ID NO: 8799 - DNA, 23 bp, Artificial Sequence
  Synthetic
ccgttttttttttttcatttctc

SEQ ID NO: 8800 - DNA, 23 bp, Artificial Sequence
  Synthetic
ccgttttttttttttcgaagcaa

SEQ ID NO: 8801 - DNA, 23 bp, Artificial Sequence
  Synthetic
ccgttttttttttttgatatccc

SEQ ID NO: 8802 - DNA, 23 bp, Artificial Sequence
  Synthetic
ccgttttttttttttcataccac

SEQ ID NO: 8803 - DNA, 23 bp, Artificial Sequence
  Synthetic
ccgttttttttttttgagctact

SEQ ID NO: 8804 - DNA, 23 bp, Artificial Sequence
  Synthetic
ccgttttttttttttagctccta

SEQ ID NO: 8805 - DNA, 23 bp, Artificial Sequence
  Synthetic
ccgttttttttttttaagaagag

SEQ ID NO: 8806 - DNA, 23 bp, Artificial Sequence
  Synthetic
ccgttttttttttttgagcgtta

SEQ ID NO: 8807 - DNA, 23 bp, Artificial Sequence
  Synthetic
ccgttttttttttttgcaacgct

SEQ ID NO: 8808 - DNA, 23 bp, Artificial Sequence
  Synthetic
ccgttttttttttttccatgcca

SEQ ID NO: 8809 - DNA, 23 bp, Artificial Sequence
  Synthetic
ccgttttttttttttaataagag

SEQ ID NO: 8810 - DNA, 23 bp, Artificial Sequence
  Synthetic
ccgttttttttttttgttacctg

SEQ ID NO: 8811 - DNA, 23 bp, Artificial Sequence
  Synthetic
ccgttttttttttttggtcagtg

SEQ ID NO: 8812 - DNA, 23 bp, Artificial Sequence
  Synthetic
ccgttttttttttttcctacagt

SEQ ID NO: 8813 - DNA, 23 bp, Artificial Sequence
  Synthetic
ccgttttttttttttacagtctt

SEQ ID NO: 8814 - DNA, 23 bp, Artificial Sequence
  Synthetic
ccgttttttttttttcactgggt

SEQ ID NO: 8815 - DNA, 23 bp, Artificial Sequence
  Synthetic
ccgttttttttttttaaaaggat

SEQ ID NO: 8816 - DNA, 23 bp, Artificial Sequence
  Synthetic
ccgttttttttttttaccagatt

SEQ ID NO: 8817 - DNA, 23 bp, Artificial Sequence
  Synthetic
ccgttttttttttttctacaaga

SEQ ID NO: 8818 - DNA, 23 bp, Artificial Sequence
  Synthetic
ccgttttttttttttcgtgaaaa

SEQ ID NO: 8819 - DNA, 23 bp, Artificial Sequence
  Synthetic
ccgttttttttttttatcagaaa

SEQ ID NO: 8820 - DNA, 23 bp, Artificial Sequence
  Synthetic
ccgttttttttttttcataacaa

SEQ ID NO: 8821 - DNA, 23 bp, Artificial Sequence
  Synthetic
ccgttttttttttttataccacc

SEQ ID NO: 8822 - DNA, 23 bp, Artificial Sequence
  Synthetic
ccgttttttttttttgctttgcc

SEQ ID NO: 8823 - DNA, 23 bp, Artificial Sequence
  Synthetic
ccgttttttttttttgcagcaga

SEQ ID NO: 8824 - DNA, 23 bp, Artificial Sequence
  Synthetic
ccgttttttttttttaccaaact

SEQ ID NO: 8825 - DNA, 23 bp, Artificial Sequence
  Synthetic
ccgttttttttttttagttttgc

SEQ ID NO: 8826 - DNA, 23 bp, Artificial Sequence
  Synthetic
ccgttttttttttttctccactg

SEQ ID NO: 8827 - DNA, 23 bp, Artificial Sequence
  Synthetic
ccgttttttttttttaatgcttt

SEQ ID NO: 8828 - DNA, 23 bp, Artificial Sequence
  Synthetic
ccgttttttttttttcaaacacc

SEQ ID NO: 8829 - DNA, 23 bp, Artificial Sequence
  Synthetic
ccgttttttttttttcagccgac

SEQ ID NO: 8830 - DNA, 23 bp, Artificial Sequence
  Synthetic
ccgttttttttttttcaaccagc

SEQ ID NO: 8831 - DNA, 23 bp, Artificial Sequence
  Synthetic
ccgttttttttttttactgctag

SEQ ID NO: 8832 - DNA, 23 bp, Artificial Sequence
  Synthetic
ccgttttttttttttaataccaa

SEQ ID NO: 8833 - DNA, 23 bp, Artificial Sequence
  Synthetic
ccgttttttttttttaggagcag

SEQ ID NO: 8834 - DNA, 23 bp, Artificial Sequence
  Synthetic
ccgttttttttttttcatagctc

SEQ ID NO: 8835 - DNA, 23 bp, Artificial Sequence
  Synthetic
ccgttttttttttttgatttgtt

SEQ ID NO: 8836 - DNA, 23 bp, Artificial Sequence
  Synthetic
ccgttttttttttttcctgcaac

SEQ ID NO: 8837 - DNA, 23 bp, Artificial Sequence
  Synthetic
ccgttttttttttttccttgaca

SEQ ID NO: 8838 - DNA, 23 bp, Artificial Sequence
  Synthetic
ccgttttttttttttcgtcagag

SEQ ID NO: 8839 - DNA, 23 bp, Artificial Sequence
  Synthetic
ccgttttttttttttcatgcgaa

SEQ ID NO: 8840 - DNA, 23 bp, Artificial Sequence
  Synthetic
ccgttttttttttttgtgaacgg

SEQ ID NO: 8841 - DNA, 23 bp, Artificial Sequence
  Synthetic
ccgttttttttttttactgcaag

SEQ ID NO: 8842 - DNA, 23 bp, Artificial Sequence
  Synthetic
ccgttttttttttttactccagt

SEQ ID NO: 8843 - DNA, 23 bp, Artificial Sequence
  Synthetic
ccgttttttttttttcaagctga

SEQ ID NO: 8844 - DNA, 23 bp, Artificial Sequence
  Synthetic
ccgttttttttttttcatcacac

SEQ ID NO: 8845 - DNA, 23 bp, Artificial Sequence
  Synthetic
ccgttttttttttttagctgatg

SEQ ID NO: 8846 - DNA, 23 bp, Artificial Sequence
  Synthetic
ccgttttttttttttaggtgatt

SEQ ID NO: 8847 - DNA, 23 bp, Artificial Sequence
  Synthetic
ccgttttttttttttctgtagat

SEQ ID NO: 8848 - DNA, 23 bp, Artificial Sequence
  Synthetic
ccgttttttttttttgcgacagc

SEQ ID NO: 8849 - DNA, 23 bp, Artificial Sequence
  Synthetic
ccgttttttttttttagctgaat

SEQ ID NO: 8850 - DNA, 23 bp, Artificial Sequence
  Synthetic
ccgttttttttttttagctgaat

SEQ ID NO: 8851 - DNA, 23 bp, Artificial Sequence
  Synthetic
ccgttttttttttttgaagagag

SEQ ID NO: 8852 - DNA, 23 bp, Artificial Sequence
  Synthetic
ccgttttttttttttgaagagag

SEQ ID NO: 8853 - DNA, 23 bp, Artificial Sequence
  Synthetic
ccgttttttttttttcgcatcta

SEQ ID NO: 8854 - DNA, 23 bp, Artificial Sequence
  Synthetic
ccgttttttttttttctgcagct

SEQ ID NO: 8855 - DNA, 23 bp, Artificial Sequence
  Synthetic
ccgttttttttttttaacccaag

SEQ ID NO: 8856 - DNA, 23 bp, Artificial Sequence
  Synthetic
ccgttttttttttttaacatgga

SEQ ID NO: 8857 - DNA, 23 bp, Artificial Sequence
  Synthetic
ccgttttttttttttagcacgga

SEQ ID NO: 8858 - DNA, 23 bp, Artificial Sequence
  Synthetic
ccgttttttttttttagcacgga

SEQ ID NO: 8859 - DNA, 23 bp, Artificial Sequence
  Synthetic
ccgttttttttttttctcggatt

SEQ ID NO: 8860 - DNA, 23 bp, Artificial Sequence
  Synthetic
ccgttttttttttttctcagcag

SEQ ID NO: 8861 - DNA, 23 bp, Artificial Sequence
  Synthetic
ccgttttttttttttctcagcgg

SEQ ID NO: 8862 - DNA, 23 bp, Artificial Sequence
  Synthetic
ccgttttttttttttacaaccca

SEQ ID NO: 8863 - DNA, 23 bp, Artificial Sequence
  Synthetic
ccgttttttttttttacacacag

SEQ ID NO: 8864 - DNA, 23 bp, Artificial Sequence
  Synthetic
ccgttttttttttttattgccgt

SEQ ID NO: 8865 - DNA, 23 bp, Artificial Sequence
  Synthetic
ccgttttttttttttcatcatcc

SEQ ID NO: 8866 - DNA, 23 bp, Artificial Sequence
  Synthetic
ccgttttttttttttgaactaga

SEQ ID NO: 8867 - DNA, 23 bp, Artificial Sequence
  Synthetic
ccgttttttttttttgagatgag

SEQ ID NO: 8868 - DNA, 23 bp, Artificial Sequence
  Synthetic
ccgttttttttttttctgtaagc

SEQ ID NO: 8869 - DNA, 23 bp, Artificial Sequence
  Synthetic
ccgttttttttttttccaactcg

SEQ ID NO: 8870 - DNA, 23 bp, Artificial Sequence
  Synthetic
ccgttttttttttttcggtaacg

SEQ ID NO: 8871 - DNA, 23 bp, Artificial Sequence
  Synthetic
ccgttttttttttttcggttacg

SEQ ID NO: 8872 - DNA, 23 bp, Artificial Sequence
  Synthetic
ccgttttttttttttcacatccc

SEQ ID NO: 8873 - DNA, 23 bp, Artificial Sequence
  Synthetic
ccgttttttttttttctactctt

SEQ ID NO: 8874 - DNA, 23 bp, Artificial Sequence
  Synthetic
ccgttttttttttttatggaaac

SEQ ID NO: 8875 - DNA, 23 bp, Artificial Sequence
  Synthetic
ccgttttttttttttcactaccc

SEQ ID NO: 8876 - DNA, 23 bp, Artificial Sequence
  Synthetic
ccgttttttttttttgctatgcc

SEQ ID NO: 8877 - DNA, 23 bp, Artificial Sequence
  Synthetic
ccgttttttttttttactgaact

SEQ ID NO: 8878 - DNA, 23 bp, Artificial Sequence
  Synthetic
ccgttttttttttttgtagactg

SEQ ID NO: 8879 - DNA, 23 bp, Artificial Sequence
  Synthetic
ccgttttttttttttgaagccgg

SEQ ID NO: 8880 - DNA, 23 bp, Artificial Sequence
  Synthetic
ccgttttttttttttcaaggctt

SEQ ID NO: 8881 - DNA, 23 bp, Artificial Sequence
  Synthetic
ccgttttttttttttggacagct

SEQ ID NO: 8882 - DNA, 23 bp, Artificial Sequence
  Synthetic
ccgttttttttttttgcacaaac

SEQ ID NO: 8883 - DNA, 23 bp, Artificial Sequence
  Synthetic
ccgttttttttttttagctttgg

SEQ ID NO: 8884 - DNA, 23 bp, Artificial Sequence
  Synthetic
ccgttttttttttttcggctttc

SEQ ID NO: 8885 - DNA, 23 bp, Artificial Sequence
  Synthetic
ccgttttttttttttactagctt

SEQ ID NO: 8886 - DNA, 23 bp, Artificial Sequence
  Synthetic
ccgttttttttttttactggctt

SEQ ID NO: 8887 - DNA, 23 bp, Artificial Sequence
  Synthetic
ccgttttttttttttactgaatt

SEQ ID NO: 8888 - DNA, 23 bp, Artificial Sequence
  Synthetic
ccgttttttttttttacaatatt

SEQ ID NO: 8889 - DNA, 23 bp, Artificial Sequence
  Synthetic
ccgttttttttttttgcacgact

SEQ ID NO: 8890 - DNA, 23 bp, Artificial Sequence
  Synthetic
ccgttttttttttttgactgtgg

SEQ ID NO: 8891 - DNA, 23 bp, Artificial Sequence
  Synthetic
ccgttttttttttttacacctga

SEQ ID NO: 8892 - DNA, 23 bp, Artificial Sequence
  Synthetic
ccgttttttttttttggggcatt

SEQ ID NO: 8893 - DNA, 23 bp, Artificial Sequence
  Synthetic
ccgttttttttttttataaggat

SEQ ID NO: 8894 - DNA, 23 bp, Artificial Sequence
  Synthetic
ccgttttttttttttacggcatt

SEQ ID NO: 8895 - DNA, 23 bp, Artificial Sequence
  Synthetic
ccgttttttttttttatgggaca

SEQ ID NO: 8896 - DNA, 23 bp, Artificial Sequence
  Synthetic
ccgttttttttttttaccagcta

SEQ ID NO: 8897 - DNA, 23 bp, Artificial Sequence
  Synthetic
ccgttttttttttttattaggaa

SEQ ID NO: 8898 - DNA, 23 bp, Artificial Sequence
  Synthetic
ccgttttttttttttaatcagct

SEQ ID NO: 8899 - DNA, 23 bp, Artificial Sequence
  Synthetic
ccgttttttttttttactataca

SEQ ID NO: 8900 - DNA, 23 bp, Artificial Sequence
  Synthetic
ccgttttttttttttctccatac

SEQ ID NO: 8901 - DNA, 23 bp, Artificial Sequence
  Synthetic
ccgttttttttttttacaaattc

SEQ ID NO: 8902 - DNA, 23 bp, Artificial Sequence
  Synthetic
ccgttttttttttttcacaagtt

SEQ ID NO: 8903 - DNA, 23 bp, Artificial Sequence
  Synthetic
ccgttttttttttttgcaagaac

SEQ ID NO: 8904 - DNA, 23 bp, Artificial Sequence
  Synthetic
ccgttttttttttttaccagtac

SEQ ID NO: 8905 - DNA, 23 bp, Artificial Sequence
  Synthetic
ccgttttttttttttcttggcat

SEQ ID NO: 8906 - DNA, 23 bp, Artificial Sequence
  Synthetic
ccgttttttttttttcacaagtt

SEQ ID NO: 8907 - DNA, 23 bp, Artificial Sequence
  Synthetic
ccgttttttttttttacagctgg

SEQ ID NO: 8908 - DNA, 23 bp, Artificial Sequence
  Synthetic
ccgttttttttttttactcatca

SEQ ID NO: 8909 - DNA, 23 bp, Artificial Sequence
  Synthetic
ccgttttttttttttactcgtca

SEQ ID NO: 8910 - DNA, 23 bp, Artificial Sequence
  Synthetic
ccgttttttttttttaggagaga

SEQ ID NO: 8911 - DNA, 23 bp, Artificial Sequence
  Synthetic
ccgttttttttttttgcccttat

SEQ ID NO: 8912 - DNA, 23 bp, Artificial Sequence
  Synthetic
ccgttttttttttttcggggcga

SEQ ID NO: 8913 - DNA, 23 bp, Artificial Sequence
  Synthetic
ccgttttttttttttagccgctg

SEQ ID NO: 8914 - DNA, 23 bp, Artificial Sequence
  Synthetic
ccgttttttttttttcaagaatt

SEQ ID NO: 8915 - DNA, 23 bp, Artificial Sequence
  Synthetic
ccgttttttttttttgtgaattc

SEQ ID NO: 8916 - DNA, 23 bp, Artificial Sequence
  Synthetic
ccgttttttttttttgtgaattc

SEQ ID NO: 8917 - DNA, 23 bp, Artificial Sequence
  Synthetic
ccgttttttttttttattacccg

SEQ ID NO: 8918 - DNA, 23 bp, Artificial Sequence
  Synthetic
ccgttttttttttttcgcgcgct

SEQ ID NO: 8919 - DNA, 23 bp, Artificial Sequence
  Synthetic
ccgttttttttttttcgtaggaa

SEQ ID NO: 8920 - DNA, 23 bp, Artificial Sequence
  Synthetic
ccgttttttttttttagagcacg

SEQ ID NO: 8921 - DNA, 23 bp, Artificial Sequence
  Synthetic
ccgttttttttttttagagcacg

SEQ ID NO: 8922 - DNA, 23 bp, Artificial Sequence
  Synthetic
ccgttttttttttttgtcgtacc

SEQ ID NO: 8923 - DNA, 23 bp, Artificial Sequence
  Synthetic
ccgttttttttttttaaacggac

SEQ ID NO: 8924 - DNA, 23 bp, Artificial Sequence
  Synthetic
ccgttttttttttttaatgagtg

SEQ ID NO: 8925 - DNA, 23 bp, Artificial Sequence
  Synthetic
ccgttttttttttttatcatttc

SEQ ID NO: 8926 - DNA, 23 bp, Artificial Sequence
  Synthetic
ccgttttttttttttacaaagag

SEQ ID NO: 8927 - DNA, 23 bp, Artificial Sequence
  Synthetic
ccgttttttttttttactgtcga

SEQ ID NO: 8928 - DNA, 23 bp, Artificial Sequence
  Synthetic
ccgttttttttttttactgtcga

SEQ ID NO: 8929 - DNA, 23 bp, Artificial Sequence
  Synthetic
ccgttttttttttttacagacaa

SEQ ID NO: 8930 - DNA, 23 bp, Artificial Sequence
  Synthetic
ccgttttttttttttagaattac

SEQ ID NO: 8931 - DNA, 23 bp, Artificial Sequence
  Synthetic
ccgttttttttttttcaattgct

SEQ ID NO: 8932 - DNA, 23 bp, Artificial Sequence
  Synthetic
ccgttttttttttttgcactgat

SEQ ID NO: 8933 - DNA, 23 bp, Artificial Sequence
  Synthetic
ccgttttttttttttagcacgag

SEQ ID NO: 8934 - DNA, 23 bp, Artificial Sequence
  Synthetic
ccgttttttttttttgtgcaaac

SEQ ID NO: 8935 - DNA, 23 bp, Artificial Sequence
  Synthetic
ccgttttttttttttcatgaaat

SEQ ID NO: 8936 - DNA, 23 bp, Artificial Sequence
  Synthetic
ccgttttttttttttagtcgcag

SEQ ID NO: 8937 - DNA, 23 bp, Artificial Sequence
  Synthetic
ccgttttttttttttgctcatca

SEQ ID NO: 8938 - DNA, 23 bp, Artificial Sequence
  Synthetic
ccgttttttttttttgctcctca

SEQ ID NO: 8939 - DNA, 23 bp, Artificial Sequence
  Synthetic
ccgttttttttttttgcccatca

SEQ ID NO: 8940 - DNA, 23 bp, Artificial Sequence
  Synthetic
ccgttttttttttttgagacaca

SEQ ID NO: 8941 - DNA, 23 bp, Artificial Sequence
  Synthetic
ccgttttttttttttaccagttt

SEQ ID NO: 8942 - DNA, 23 bp, Artificial Sequence
  Synthetic
ccgttttttttttttctcacatt

SEQ ID NO: 8943 - DNA, 23 bp, Artificial Sequence
  Synthetic
ccgttttttttttttcagagcac

SEQ ID NO: 8944 - DNA, 23 bp, Artificial Sequence
  Synthetic
ccgttttttttttttgagagtca

SEQ ID NO: 8945 - DNA, 23 bp, Artificial Sequence
  Synthetic
ccgttttttttttttgcacaggc

SEQ ID NO: 8946 - DNA, 23 bp, Artificial Sequence
  Synthetic
ccgttttttttttttctcactca

SEQ ID NO: 8947 - DNA, 23 bp, Artificial Sequence
  Synthetic
ccgttttttttttttctcacagt

SEQ ID NO: 8948 - DNA, 23 bp, Artificial Sequence
  Synthetic
ccgttttttttttttaggacaaa

SEQ ID NO: 8949 - DNA, 23 bp, Artificial Sequence
  Synthetic
ccgttttttttttttaaaggccg

SEQ ID NO: 8950 - DNA, 23 bp, Artificial Sequence
  Synthetic
ccgttttttttttttcaggccgg

SEQ ID NO: 8951 - DNA, 23 bp, Artificial Sequence
  Synthetic
ccgttttttttttttcaggccgt

SEQ ID NO: 8952 - DNA, 23 bp, Artificial Sequence
  Synthetic
ccgttttttttttttcgggctgt

SEQ ID NO: 8953 - DNA, 23 bp, Artificial Sequence
  Synthetic
ccgttttttttttttccgaactt

SEQ ID NO: 8954 - DNA, 23 bp, Artificial Sequence
  Synthetic
ccgttttttttttttgctttctg

SEQ ID NO: 8955 - DNA, 23 bp, Artificial Sequence
  Synthetic
ccgttttttttttttcgccagta

SEQ ID NO: 8956 - DNA, 23 bp, Artificial Sequence
  Synthetic
ccgttttttttttttactggata

SEQ ID NO: 8957 - DNA, 23 bp, Artificial Sequence
  Synthetic
ccgttttttttttttgagataaa

SEQ ID NO: 8958 - DNA, 23 bp, Artificial Sequence
  Synthetic
ccgttttttttttttcagctatg

SEQ ID NO: 8959 - DNA, 23 bp, Artificial Sequence
  Synthetic
ccgttttttttttttcagctatt

SEQ ID NO: 8960 - DNA, 23 bp, Artificial Sequence
  Synthetic
ccgttttttttttttcaatgcga

SEQ ID NO: 8961 - DNA, 23 bp, Artificial Sequence
  Synthetic
ccgttttttttttttcaaccagc

SEQ ID NO: 8962 - DNA, 23 bp, Artificial Sequence
  Synthetic
ccgttttttttttttcaatggtt

SEQ ID NO: 8963 - DNA, 23 bp, Artificial Sequence
  Synthetic
ccgttttttttttttcatatcac

SEQ ID NO: 8964 - DNA, 23 bp, Artificial Sequence
  Synthetic
ccgttttttttttttaaaaagaa

SEQ ID NO: 8965 - DNA, 23 bp, Artificial Sequence
  Synthetic
ccgttttttttttttacaacaaa

SEQ ID NO: 8966 - DNA, 23 bp, Artificial Sequence
  Synthetic
ccgttttttttttttatgctttg

SEQ ID NO: 8967 - DNA, 23 bp, Artificial Sequence
  Synthetic
ccgttttttttttttgacatctt

SEQ ID NO: 8968 - DNA, 23 bp, Artificial Sequence
  Synthetic
ccgttttttttttttcacacctg

SEQ ID NO: 8969 - DNA, 23 bp, Artificial Sequence
  Synthetic
ccgttttttttttttataggccg

SEQ ID NO: 8970 - DNA, 23 bp, Artificial Sequence
  Synthetic
ccgttttttttttttgcaggccg

SEQ ID NO: 8971 - DNA, 23 bp, Artificial Sequence
  Synthetic
ccgttttttttttttcatacagc

SEQ ID NO: 8972 - DNA, 23 bp, Artificial Sequence
  Synthetic
ccgttttttttttttcatacagc

SEQ ID NO: 8973 - DNA, 23 bp, Artificial Sequence
  Synthetic
ccgttttttttttttctacagct

SEQ ID NO: 8974 - DNA, 23 bp, Artificial Sequence
  Synthetic
ccgttttttttttttgttacgta

SEQ ID NO: 8975 - DNA, 23 bp, Artificial Sequence
  Synthetic
ccgttttttttttttcaggatac

SEQ ID NO: 8976 - DNA, 23 bp, Artificial Sequence
  Synthetic
ccgttttttttttttaatcagct

SEQ ID NO: 8977 - DNA, 23 bp, Artificial Sequence
  Synthetic
ccgttttttttttttactataca

SEQ ID NO: 8978 - DNA, 23 bp, Artificial Sequence
  Synthetic
ccgttttttttttttctccatac

SEQ ID NO: 8979 - DNA, 23 bp, Artificial Sequence
  Synthetic
ccgttttttttttttacaaattc

SEQ ID NO: 8980 - DNA, 23 bp, Artificial Sequence
  Synthetic
ccgttttttttttttcacaagtt

SEQ ID NO: 8981 - DNA, 23 bp, Artificial Sequence
  Synthetic
ccgttttttttttttgcaagaac

SEQ ID NO: 8982 - DNA, 23 bp, Artificial Sequence
  Synthetic
ccgttttttttttttaccagtac

SEQ ID NO: 8983 - DNA, 23 bp, Artificial Sequence
  Synthetic
ccgttttttttttttcttggcat

SEQ ID NO: 8984 - DNA, 23 bp, Artificial Sequence
  Synthetic
ccgttttttttttttcacaagtt

SEQ ID NO: 8985 - DNA, 23 bp, Artificial Sequence
  Synthetic
ccgttttttttttttacagctgg

SEQ ID NO: 8986 - DNA, 23 bp, Artificial Sequence
  Synthetic
ccgttttttttttttactcatca

SEQ ID NO: 8987 - DNA, 23 bp, Artificial Sequence
  Synthetic
ccgttttttttttttactcgtca

SEQ ID NO: 8988 - DNA, 23 bp, Artificial Sequence
  Synthetic
ccgttttttttttttaggagaga

SEQ ID NO: 8989 - DNA, 23 bp, Artificial Sequence
  Synthetic
ccgttttttttttttgcccttat

SEQ ID NO: 8990 - DNA, 23 bp, Artificial Sequence
  Synthetic
ccgttttttttttttagccgctg

SEQ ID NO: 8991 - DNA, 23 bp, Artificial Sequence
  Synthetic
ccgttttttttttttcaagaatt

SEQ ID NO: 8992 - DNA, 23 bp, Artificial Sequence
  Synthetic
ccgttttttttttttgtgaattc

SEQ ID NO: 8993 - DNA, 23 bp, Artificial Sequence
  Synthetic
ccgttttttttttttgtgaattc

SEQ ID NO: 8994 - DNA, 23 bp, Artificial Sequence
  Synthetic
ccgttttttttttttattacccg

SEQ ID NO: 8995 - DNA, 23 bp, Artificial Sequence
  Synthetic
ccgttttttttttttcgcgcgct

SEQ ID NO: 8996 - DNA, 23 bp, Artificial Sequence
  Synthetic
ccgttttttttttttagagcacg

SEQ ID NO: 8997 - DNA, 23 bp, Artificial Sequence
  Synthetic
ccgttttttttttttagagcacg

SEQ ID NO: 8998 - DNA, 23 bp, Artificial Sequence
  Synthetic
ccgttttttttttttgtcgtacc

SEQ ID NO: 8999 - DNA, 23 bp, Artificial Sequence
  Synthetic
ccgttttttttttttaaacggac

SEQ ID NO: 9000 - DNA, 23 bp, Artificial Sequence
  Synthetic
ccgttttttttttttaatgagtg

SEQ ID NO: 9001 - DNA, 23 bp, Artificial Sequence
  Synthetic
ccgttttttttttttatcatttc

SEQ ID NO: 9002 - DNA, 23 bp, Artificial Sequence
  Synthetic
ccgttttttttttttacaaagag

SEQ ID NO: 9003 - DNA, 23 bp, Artificial Sequence
  Synthetic
ccgttttttttttttacagacaa

SEQ ID NO: 9004 - DNA, 23 bp, Artificial Sequence
  Synthetic
ccgttttttttttttagaattac

SEQ ID NO: 9005 - DNA, 23 bp, Artificial Sequence
  Synthetic
ccgttttttttttttcaattgct

SEQ ID NO: 9006 - DNA, 23 bp, Artificial Sequence
  Synthetic
ccgttttttttttttgcactgat

SEQ ID NO: 9007 - DNA, 23 bp, Artificial Sequence
  Synthetic
ccgttttttttttttagcacgag

SEQ ID NO: 9008 - DNA, 23 bp, Artificial Sequence
  Synthetic
ccgttttttttttttgtgcaaac

SEQ ID NO: 9009 - DNA, 23 bp, Artificial Sequence
  Synthetic
ccgttttttttttttcatgaaat

SEQ ID NO: 9010 - DNA, 23 bp, Artificial Sequence
  Synthetic
ccgttttttttttttagtcgcag

SEQ ID NO: 9011 - DNA, 23 bp, Artificial Sequence
  Synthetic
ccgttttttttttttgctcatca

SEQ ID NO: 9012 - DNA, 23 bp, Artificial Sequence
  Synthetic
ccgttttttttttttgctcctca

SEQ ID NO: 9013 - DNA, 23 bp, Artificial Sequence
  Synthetic
ccgttttttttttttgcccatca

SEQ ID NO: 9014 - DNA, 23 bp, Artificial Sequence
  Synthetic
ccgttttttttttttgagacaca

SEQ ID NO: 9015 - DNA, 23 bp, Artificial Sequence
  Synthetic
ccgttttttttttttctcacatt

SEQ ID NO: 9016 - DNA, 23 bp, Artificial Sequence
  Synthetic
ccgttttttttttttcagagcac

SEQ ID NO: 9017 - DNA, 23 bp, Artificial Sequence
  Synthetic
ccgttttttttttttgagagtca

SEQ ID NO: 9018 - DNA, 23 bp, Artificial Sequence
  Synthetic
ccgttttttttttttctcactca

SEQ ID NO: 9019 - DNA, 23 bp, Artificial Sequence
  Synthetic
ccgttttttttttttctcacagt

SEQ ID NO: 9020 - DNA, 23 bp, Artificial Sequence
  Synthetic
ccgttttttttttttaagacaaa

SEQ ID NO: 9021 - DNA, 23 bp, Artificial Sequence
  Synthetic
ccgttttttttttttccgaactt

SEQ ID NO: 9022 - DNA, 23 bp, Artificial Sequence
  Synthetic
ccgttttttttttttgctttctg

SEQ ID NO: 9023 - DNA, 23 bp, Artificial Sequence
  Synthetic
ccgttttttttttttcgccagta

SEQ ID NO: 9024 - DNA, 23 bp, Artificial Sequence
  Synthetic
ccgttttttttttttattggata

SEQ ID NO: 9025 - DNA, 23 bp, Artificial Sequence
  Synthetic
ccgttttttttttttgagataaa

SEQ ID NO: 9026 - DNA, 23 bp, Artificial Sequence
  Synthetic
ccgttttttttttttcagctatg

SEQ ID NO: 9027 - DNA, 23 bp, Artificial Sequence
  Synthetic
ccgttttttttttttcagctatt

SEQ ID NO: 9028 - DNA, 23 bp, Artificial Sequence
  Synthetic
ccgttttttttttttcaatgcga

SEQ ID NO: 9029 - DNA, 23 bp, Artificial Sequence
  Synthetic
ccgttttttttttttcaaccagc

SEQ ID NO: 9030 - DNA, 23 bp, Artificial Sequence
  Synthetic
ccgttttttttttttcaatggtt

SEQ ID NO: 9031 - DNA, 23 bp, Artificial Sequence
  Synthetic
ccgttttttttttttcatatcac

SEQ ID NO: 9032 - DNA, 23 bp, Artificial Sequence
  Synthetic
ccgttttttttttttaaaaagaa

SEQ ID NO: 9033 - DNA, 23 bp, Artificial Sequence
  Synthetic
ccgttttttttttttacaacaaa

SEQ ID NO: 9034 - DNA, 23 bp, Artificial Sequence
  Synthetic
ccgttttttttttttatgctttg

SEQ ID NO: 9035 - DNA, 23 bp, Artificial Sequence
  Synthetic
ccgttttttttttttgacatctt

SEQ ID NO: 9036 - DNA, 23 bp, Artificial Sequence
  Synthetic
ccgttttttttttttcacacctg

SEQ ID NO: 9037 - DNA, 23 bp, Artificial Sequence
  Synthetic
ccgttttttttttttataggccg

SEQ ID NO: 9038 - DNA, 23 bp, Artificial Sequence
  Synthetic
ccgttttttttttttgcaggccg

SEQ ID NO: 9039 - DNA, 23 bp, Artificial Sequence
  Synthetic
ccgttttttttttttcatacagc

SEQ ID NO: 9040 - DNA, 23 bp, Artificial Sequence
  Synthetic
ccgttttttttttttcatacagc

SEQ ID NO: 9041 - DNA, 23 bp, Artificial Sequence
  Synthetic
ccgttttttttttttctacagct

SEQ ID NO: 9042 - DNA, 23 bp, Artificial Sequence
  Synthetic
ccgttttttttttttgttacgta

SEQ ID NO: 9043 - DNA, 23 bp, Artificial Sequence
  Synthetic
ccgttttttttttttcaggatac

SEQ ID NO: 9044 - DNA, 23 bp, Artificial Sequence
  Synthetic
ccgttttttttttttaactatac

SEQ ID NO: 9045 - DNA, 23 bp, Artificial Sequence
  Synthetic
ccgttttttttttttaaccacac

SEQ ID NO: 9046 - DNA, 23 bp, Artificial Sequence
  Synthetic
ccgttttttttttttaaccatac

SEQ ID NO: 9047 - DNA, 23 bp, Artificial Sequence
  Synthetic
ccgttttttttttttaaccatac

SEQ ID NO: 9048 - DNA, 23 bp, Artificial Sequence
  Synthetic
ccgttttttttttttaactattc

SEQ ID NO: 9049 - DNA, 23 bp, Artificial Sequence
  Synthetic
ccgttttttttttttaactatac

SEQ ID NO: 9050 - DNA, 23 bp, Artificial Sequence
  Synthetic
ccgttttttttttttaactatac

SEQ ID NO: 9051 - DNA, 23 bp, Artificial Sequence
  Synthetic
ccgttttttttttttaacaacac

SEQ ID NO: 9052 - DNA, 23 bp, Artificial Sequence
  Synthetic
ccgttttttttttttaacagcac

SEQ ID NO: 9053 - DNA, 23 bp, Artificial Sequence
  Synthetic
ccgttttttttttttaactgtac

SEQ ID NO: 9054 - DNA, 23 bp, Artificial Sequence
  Synthetic
ccgttttttttttttatacatac

SEQ ID NO: 9055 - DNA, 23 bp, Artificial Sequence
  Synthetic
ccgttttttttttttcacaagtt

SEQ ID NO: 9056 - DNA, 23 bp, Artificial Sequence
  Synthetic
ccgttttttttttttcttcagtt

SEQ ID NO: 9057 - DNA, 23 bp, Artificial Sequence
  Synthetic
ccgttttttttttttcttcagtt

SEQ ID NO: 9058 - DNA, 23 bp, Artificial Sequence
  Synthetic
ccgttttttttttttcatagccc

SEQ ID NO: 9059 - DNA, 23 bp, Artificial Sequence
  Synthetic
ccgttttttttttttgatagccc

SEQ ID NO: 9060 - DNA, 23 bp, Artificial Sequence
  Synthetic
ccgttttttttttttacaaattc

SEQ ID NO: 9061 - DNA, 23 bp, Artificial Sequence
  Synthetic
ccgttttttttttttattcccca

SEQ ID NO: 9062 - DNA, 23 bp, Artificial Sequence
  Synthetic
ccgttttttttttttcacaaatt

SEQ ID NO: 9063 - DNA, 23 bp, Artificial Sequence
  Synthetic
ccgttttttttttttacaaatcc

SEQ ID NO: 9064 - DNA, 23 bp, Artificial Sequence
  Synthetic
ccgttttttttttttcacacatt

SEQ ID NO: 9065 - DNA, 23 bp, Artificial Sequence
  Synthetic
ccgttttttttttttactcccct

SEQ ID NO: 9066 - DNA, 23 bp, Artificial Sequence
  Synthetic
ccgttttttttttttcaaacacc

SEQ ID NO: 9067 - DNA, 23 bp, Artificial Sequence
  Synthetic
ccgttttttttttttggcattca

SEQ ID NO: 9068 - DNA, 23 bp, Artificial Sequence
  Synthetic
ccgttttttttttttcacaggtt

SEQ ID NO: 9069 - DNA, 23 bp, Artificial Sequence
  Synthetic
ccgttttttttttttcacaagtt

SEQ ID NO: 9070 - DNA, 23 bp, Artificial Sequence
  Synthetic
ccgttttttttttttcacgagtt

SEQ ID NO: 9071 - DNA, 23 bp, Artificial Sequence
  Synthetic
ccgttttttttttttgcattatt

SEQ ID NO: 9072 - DNA, 23 bp, Artificial Sequence
  Synthetic
ccgttttttttttttcgcgtacc

SEQ ID NO: 9073 - DNA, 23 bp, Artificial Sequence
  Synthetic
ccgttttttttttttaaaagaga

SEQ ID NO: 9074 - DNA, 23 bp, Artificial Sequence
  Synthetic
ccgttttttttttttagcaagcc

SEQ ID NO: 9075 - DNA, 23 bp, Artificial Sequence
  Synthetic
ccgttttttttttttatgctttt

SEQ ID NO: 9076 - DNA, 23 bp, Artificial Sequence
  Synthetic
ccgttttttttttttatgccctt

SEQ ID NO: 9077 - DNA, 23 bp, Artificial Sequence
  Synthetic
ccgttttttttttttatgccctt

SEQ ID NO: 9078 - DNA, 23 bp, Artificial Sequence
  Synthetic
ccgttttttttttttatgccctt

SEQ ID NO: 9079 - DNA, 23 bp, Artificial Sequence
  Synthetic
ccgttttttttttttcgaccatg

SEQ ID NO: 9080 - DNA, 23 bp, Artificial Sequence
  Synthetic
ccgttttttttttttagtaacaa

SEQ ID NO: 9081 - DNA, 23 bp, Artificial Sequence
  Synthetic
ccgttttttttttttcagctggt

SEQ ID NO: 9082 - DNA, 23 bp, Artificial Sequence
  Synthetic
ccgttttttttttttatttggtt

SEQ ID NO: 9083 - DNA, 23 bp, Artificial Sequence
  Synthetic
ccgttttttttttttagctggtt

SEQ ID NO: 9084 - DNA, 23 bp, Artificial Sequence
  Synthetic
ccgttttttttttttgacttggt

SEQ ID NO: 9085 - DNA, 23 bp, Artificial Sequence
  Synthetic
ccgttttttttttttagctggtt

SEQ ID NO: 9086 - DNA, 23 bp, Artificial Sequence
  Synthetic
ccgttttttttttttcacatagg

SEQ ID NO: 9087 - DNA, 23 bp, Artificial Sequence
  Synthetic
ccgttttttttttttcagatagg

SEQ ID NO: 9088 - DNA, 23 bp, Artificial Sequence
  Synthetic
ccgttttttttttttcacatagg

SEQ ID NO: 9089 - DNA, 23 bp, Artificial Sequence
  Synthetic
ccgttttttttttttacgcgtat

SEQ ID NO: 9090 - DNA, 23 bp, Artificial Sequence
  Synthetic
ccgttttttttttttggcctgat

SEQ ID NO: 9091 - DNA, 23 bp, Artificial Sequence
  Synthetic
ccgttttttttttttagacacat

SEQ ID NO: 9092 - DNA, 23 bp, Artificial Sequence
  Synthetic
ccgttttttttttttctaccata

SEQ ID NO: 9093 - DNA, 23 bp, Artificial Sequence
  Synthetic
ccgttttttttttttgtccgtgg

SEQ ID NO: 9094 - DNA, 23 bp, Artificial Sequence
  Synthetic
ccgttttttttttttgcatcgtt

SEQ ID NO: 9095 - DNA, 23 bp, Artificial Sequence
  Synthetic
ccgttttttttttttccataaag

SEQ ID NO: 9096 - DNA, 23 bp, Artificial Sequence
  Synthetic
ccgttttttttttttagtagtgc

SEQ ID NO: 9097 - DNA, 23 bp, Artificial Sequence
  Synthetic
ccgttttttttttttagtagtgc

SEQ ID NO: 9098 - DNA, 23 bp, Artificial Sequence
  Synthetic
ccgttttttttttttgagctaca

SEQ ID NO: 9099 - DNA, 23 bp, Artificial Sequence
  Synthetic
ccgttttttttttttagtacatc

SEQ ID NO: 9100 - DNA, 23 bp, Artificial Sequence
  Synthetic
ccgttttttttttttgggattcc

SEQ ID NO: 9101 - DNA, 23 bp, Artificial Sequence
  Synthetic
ccgttttttttttttccatctat

SEQ ID NO: 9102 - DNA, 23 bp, Artificial Sequence
  Synthetic
ccgttttttttttttcacccttg

SEQ ID NO: 9103 - DNA, 23 bp, Artificial Sequence
  Synthetic
ccgttttttttttttacaaagtt

SEQ ID NO: 9104 - DNA, 23 bp, Artificial Sequence
  Synthetic
ccgttttttttttttcactggta

SEQ ID NO: 9105 - DNA, 23 bp, Artificial Sequence
  Synthetic
ccgttttttttttttccaaagtt

SEQ ID NO: 9106 - DNA, 23 bp, Artificial Sequence
  Synthetic
ccgttttttttttttgatcactt

SEQ ID NO: 9107 - DNA, 23 bp, Artificial Sequence
  Synthetic
ccgttttttttttttgctcattt

SEQ ID NO: 9108 - DNA, 23 bp, Artificial Sequence
  Synthetic
ccgttttttttttttgatcattt

SEQ ID NO: 9109 - DNA, 23 bp, Artificial Sequence
  Synthetic
ccgttttttttttttcccctatc

SEQ ID NO: 9110 - DNA, 23 bp, Artificial Sequence
  Synthetic
ccgttttttttttttcacaaacc

SEQ ID NO: 9111 - DNA, 23 bp, Artificial Sequence
  Synthetic
ccgttttttttttttgccgcagc

SEQ ID NO: 9112 - DNA, 23 bp, Artificial Sequence
  Synthetic
ccgttttttttttttacaaacca

SEQ ID NO: 9113 - DNA, 23 bp, Artificial Sequence
  Synthetic
ccgttttttttttttgaaaacca

SEQ ID NO: 9114 - DNA, 23 bp, Artificial Sequence
  Synthetic
ccgttttttttttttcaccaata

SEQ ID NO: 9115 - DNA, 23 bp, Artificial Sequence
  Synthetic
ccgttttttttttttctccaata

SEQ ID NO: 9116 - DNA, 23 bp, Artificial Sequence
  Synthetic
ccgttttttttttttctccaata

SEQ ID NO: 9117 - DNA, 23 bp, Artificial Sequence
  Synthetic
ccgttttttttttttacctgcac

SEQ ID NO: 9118 - DNA, 23 bp, Artificial Sequence
  Synthetic
ccgttttttttttttctagaagt

SEQ ID NO: 9119 - DNA, 23 bp, Artificial Sequence
  Synthetic
ccgttttttttttttactcaccg

SEQ ID NO: 9120 - DNA, 23 bp, Artificial Sequence
  Synthetic
ccgttttttttttttggtacaat

SEQ ID NO: 9121 - DNA, 23 bp, Artificial Sequence
  Synthetic
ccgttttttttttttcccaccga

SEQ ID NO: 9122 - DNA, 23 bp, Artificial Sequence
  Synthetic
ccgttttttttttttcccaccga

SEQ ID NO: 9123 - DNA, 23 bp, Artificial Sequence
  Synthetic
ccgttttttttttttgtgagttc

SEQ ID NO: 9124 - DNA, 23 bp, Artificial Sequence
  Synthetic
ccgttttttttttttagttggca

SEQ ID NO: 9125 - DNA, 23 bp, Artificial Sequence
  Synthetic
ccgttttttttttttcagtgaat

SEQ ID NO: 9126 - DNA, 23 bp, Artificial Sequence
  Synthetic
ccgttttttttttttgcccttat

SEQ ID NO: 9127 - DNA, 23 bp, Artificial Sequence
  Synthetic
ccgttttttttttttggctgcaa

SEQ ID NO: 9128 - DNA, 23 bp, Artificial Sequence
  Synthetic
ccgttttttttttttatctgcac

SEQ ID NO: 9129 - DNA, 23 bp, Artificial Sequence
  Synthetic
ccgttttttttttttatctgcac

SEQ ID NO: 9130 - DNA, 23 bp, Artificial Sequence
  Synthetic
ccgttttttttttttccagaagg

SEQ ID NO: 9131 - DNA, 23 bp, Artificial Sequence
  Synthetic
ccgttttttttttttaactacac

SEQ ID NO: 9132 - DNA, 23 bp, Artificial Sequence
  Synthetic
ccgttttttttttttacctaata

SEQ ID NO: 9133 - DNA, 23 bp, Artificial Sequence
  Synthetic
ccgttttttttttttcaaccgaa

SEQ ID NO: 9134 - DNA, 23 bp, Artificial Sequence
  Synthetic
ccgttttttttttttggctgtca

SEQ ID NO: 9135 - DNA, 23 bp, Artificial Sequence
  Synthetic
ccgttttttttttttactgggac

SEQ ID NO: 9136 - DNA, 23 bp, Artificial Sequence
  Synthetic
ccgttttttttttttagcgggac

SEQ ID NO: 9137 - DNA, 23 bp, Artificial Sequence
  Synthetic
ccgttttttttttttccacatgg

SEQ ID NO: 9138 - DNA, 23 bp, Artificial Sequence
  Synthetic
ccgttttttttttttccacatgg

SEQ ID NO: 9139 - DNA, 23 bp, Artificial Sequence
  Synthetic
ccgttttttttttttcccaacaa

SEQ ID NO: 9140 - DNA, 23 bp, Artificial Sequence
  Synthetic
ccgttttttttttttcccaacaa

SEQ ID NO: 9141 - DNA, 23 bp, Artificial Sequence
  Synthetic
ccgttttttttttttgaacaggt

SEQ ID NO: 9142 - DNA, 23 bp, Artificial Sequence
  Synthetic
ccgttttttttttttaaccaatg

SEQ ID NO: 9143 - DNA, 23 bp, Artificial Sequence
  Synthetic
ccgttttttttttttcagttttg

SEQ ID NO: 9144 - DNA, 23 bp, Artificial Sequence
  Synthetic
ccgttttttttttttagtgcaac

SEQ ID NO: 9145 - DNA, 23 bp, Artificial Sequence
  Synthetic
ccgttttttttttttcagttttg

SEQ ID NO: 9146 - DNA, 23 bp, Artificial Sequence
  Synthetic
ccgttttttttttttctgaatgc

SEQ ID NO: 9147 - DNA, 23 bp, Artificial Sequence
  Synthetic
ccgttttttttttttcgagtttt

SEQ ID NO: 9148 - DNA, 23 bp, Artificial Sequence
  Synthetic
ccgttttttttttttcagttttg

SEQ ID NO: 9149 - DNA, 23 bp, Artificial Sequence
  Synthetic
ccgttttttttttttacatcgtt

SEQ ID NO: 9150 - DNA, 23 bp, Artificial Sequence
  Synthetic
ccgttttttttttttcatcatta

SEQ ID NO: 9151 - DNA, 23 bp, Artificial Sequence
  Synthetic
ccgttttttttttttgcatcatt

SEQ ID NO: 9152 - DNA, 23 bp, Artificial Sequence
  Synthetic
ccgttttttttttttcccatgcc

SEQ ID NO: 9153 - DNA, 23 bp, Artificial Sequence
  Synthetic
ccgttttttttttttcaaagagg

SEQ ID NO: 9154 - DNA, 23 bp, Artificial Sequence
  Synthetic
ccgttttttttttttcaagtggt

SEQ ID NO: 9155 - DNA, 23 bp, Artificial Sequence
  Synthetic
ccgttttttttttttcaagtggt

SEQ ID NO: 9156 - DNA, 23 bp, Artificial Sequence
  Synthetic
ccgttttttttttttgttgaact

SEQ ID NO: 9157 - DNA, 23 bp, Artificial Sequence
  Synthetic
ccgttttttttttttaggcatag

SEQ ID NO: 9158 - DNA, 23 bp, Artificial Sequence
  Synthetic
ccgttttttttttttcagactcc

SEQ ID NO: 9159 - DNA, 23 bp, Artificial Sequence
  Synthetic
ccgttttttttttttccacacac

SEQ ID NO: 9160 - DNA, 23 bp, Artificial Sequence
  Synthetic
ccgttttttttttttctacctgc

SEQ ID NO: 9161 - DNA, 23 bp, Artificial Sequence
  Synthetic
ccgttttttttttttcttcaagt

SEQ ID NO: 9162 - DNA, 23 bp, Artificial Sequence
  Synthetic
ccgttttttttttttctacctgc

SEQ ID NO: 9163 - DNA, 23 bp, Artificial Sequence
  Synthetic
ccgttttttttttttgccaacac

SEQ ID NO: 9164 - DNA, 23 bp, Artificial Sequence
  Synthetic
ccgttttttttttttagccgctg

SEQ ID NO: 9165 - DNA, 23 bp, Artificial Sequence
  Synthetic
ccgttttttttttttcaatgtgc

SEQ ID NO: 9166 - DNA, 23 bp, Artificial Sequence
  Synthetic
ccgttttttttttttagccatga

SEQ ID NO: 9167 - DNA, 23 bp, Artificial Sequence
  Synthetic
ccgttttttttttttctgcctgt

SEQ ID NO: 9168 - DNA, 23 bp, Artificial Sequence
  Synthetic
ccgttttttttttttcacagttg

SEQ ID NO: 9169 - DNA, 23 bp, Artificial Sequence
  Synthetic
ccgttttttttttttcacagttg

SEQ ID NO: 9170 - DNA, 23 bp, Artificial Sequence
  Synthetic
ccgttttttttttttccaatcag

SEQ ID NO: 9171 - DNA, 23 bp, Artificial Sequence
  Synthetic
ccgttttttttttttcacatggt

SEQ ID NO: 9172 - DNA, 23 bp, Artificial Sequence
  Synthetic
ccgttttttttttttgcatggtt

SEQ ID NO: 9173 - DNA, 23 bp, Artificial Sequence
  Synthetic
ccgttttttttttttaagaattg

SEQ ID NO: 9174 - DNA, 23 bp, Artificial Sequence
  Synthetic
ccgttttttttttttaagtgtcc

SEQ ID NO: 9175 - DNA, 23 bp, Artificial Sequence
  Synthetic
ccgttttttttttttgaaaccca

SEQ ID NO: 9176 - DNA, 23 bp, Artificial Sequence
  Synthetic
ccgttttttttttttgagaccca

SEQ ID NO: 9177 - DNA, 23 bp, Artificial Sequence
  Synthetic
ccgttttttttttttggggtatt

SEQ ID NO: 9178 - DNA, 23 bp, Artificial Sequence
  Synthetic
ccgttttttttttttacagttct

SEQ ID NO: 9179 - DNA, 23 bp, Artificial Sequence
  Synthetic
ccgttttttttttttacagctct

SEQ ID NO: 9180 - DNA, 23 bp, Artificial Sequence
  Synthetic
ccgttttttttttttggaaatcc

SEQ ID NO: 9181 - DNA, 23 bp, Artificial Sequence
  Synthetic
ccgttttttttttttggtaatcc

SEQ ID NO: 9182 - DNA, 23 bp, Artificial Sequence
  Synthetic
ccgttttttttttttctgttcct

SEQ ID NO: 9183 - DNA, 23 bp, Artificial Sequence
  Synthetic
ccgttttttttttttcagaccga

SEQ ID NO: 9184 - DNA, 23 bp, Artificial Sequence
  Synthetic
ccgttttttttttttagcctatc

SEQ ID NO: 9185 - DNA, 23 bp, Artificial Sequence
  Synthetic
ccgttttttttttttaacctatc

SEQ ID NO: 9186 - DNA, 23 bp, Artificial Sequence
  Synthetic
ccgttttttttttttagcggaac

SEQ ID NO: 9187 - DNA, 23 bp, Artificial Sequence
  Synthetic
ccgttttttttttttgcagaact

SEQ ID NO: 9188 - DNA, 23 bp, Artificial Sequence
  Synthetic
ccgttttttttttttgcagaact

SEQ ID NO: 9189 - DNA, 23 bp, Artificial Sequence
  Synthetic
ccgttttttttttttcattgttc

SEQ ID NO: 9190 - DNA, 23 bp, Artificial Sequence
  Synthetic
ccgttttttttttttgaagaact

SEQ ID NO: 9191 - DNA, 23 bp, Artificial Sequence
  Synthetic
ccgttttttttttttcactgaac

SEQ ID NO: 9192 - DNA, 23 bp, Artificial Sequence
  Synthetic
ccgttttttttttttaaccgatt

SEQ ID NO: 9193 - DNA, 23 bp, Artificial Sequence
  Synthetic
ccgttttttttttttacactgat

SEQ ID NO: 9194 - DNA, 23 bp, Artificial Sequence
  Synthetic
ccgttttttttttttctttgaca

SEQ ID NO: 9195 - DNA, 23 bp, Artificial Sequence
  Synthetic
ccgttttttttttttcaatgaca

SEQ ID NO: 9196 - DNA, 23 bp, Artificial Sequence
  Synthetic
ccgttttttttttttctatgaca

SEQ ID NO: 9197 - DNA, 23 bp, Artificial Sequence
  Synthetic
ccgttttttttttttcttccagt

SEQ ID NO: 9198 - DNA, 23 bp, Artificial Sequence
  Synthetic
ccgttttttttttttagctgagt

SEQ ID NO: 9199 - DNA, 23 bp, Artificial Sequence
  Synthetic
ccgttttttttttttctgagagt

SEQ ID NO: 9200 - DNA, 23 bp, Artificial Sequence
  Synthetic
ccgttttttttttttcttccagt

SEQ ID NO: 9201 - DNA, 23 bp, Artificial Sequence
  Synthetic
ccgttttttttttttcttccagt

SEQ ID NO: 9202 - DNA, 23 bp, Artificial Sequence
  Synthetic
ccgttttttttttttgctgcaaa

SEQ ID NO: 9203 - DNA, 23 bp, Artificial Sequence
  Synthetic
ccgttttttttttttcagctatg

SEQ ID NO: 9204 - DNA, 23 bp, Artificial Sequence
  Synthetic
ccgttttttttttttcaacaaaa

SEQ ID NO: 9205 - DNA, 23 bp, Artificial Sequence
  Synthetic
ccgttttttttttttacaaccag

SEQ ID NO: 9206 - DNA, 23 bp, Artificial Sequence
  Synthetic
ccgttttttttttttcaatcagc

SEQ ID NO: 9207 - DNA, 23 bp, Artificial Sequence
  Synthetic
ccgttttttttttttgtaatcaa

SEQ ID NO: 9208 - DNA, 23 bp, Artificial Sequence
  Synthetic
ccgttttttttttttacagatgg

SEQ ID NO: 9209 - DNA, 23 bp, Artificial Sequence
  Synthetic
ccgttttttttttttataaggat

SEQ ID NO: 9210 - DNA, 23 bp, Artificial Sequence
  Synthetic
ccgttttttttttttaacgcgag

SEQ ID NO: 9211 - DNA, 23 bp, Artificial Sequence
  Synthetic
ccgttttttttttttacggcatt

SEQ ID NO: 9212 - DNA, 23 bp, Artificial Sequence
  Synthetic
ccgttttttttttttctacccca

SEQ ID NO: 9213 - DNA, 23 bp, Artificial Sequence
  Synthetic
ccgttttttttttttctacccca

SEQ ID NO: 9214 - DNA, 23 bp, Artificial Sequence
  Synthetic
ccgttttttttttttctacccca

SEQ ID NO: 9215 - DNA, 23 bp, Artificial Sequence
  Synthetic
ccgttttttttttttctacgcca

SEQ ID NO: 9216 - DNA, 23 bp, Artificial Sequence
  Synthetic
ccgttttttttttttaccccaat

SEQ ID NO: 9217 - DNA, 23 bp, Artificial Sequence
  Synthetic
ccgttttttttttttaactcagt

SEQ ID NO: 9218 - DNA, 23 bp, Artificial Sequence
  Synthetic
ccgttttttttttttccctatta

SEQ ID NO: 9219 - DNA, 23 bp, Artificial Sequence
  Synthetic
ccgttttttttttttccctataa

SEQ ID NO: 9220 - DNA, 23 bp, Artificial Sequence
  Synthetic
ccgttttttttttttcgatgtag

SEQ ID NO: 9221 - DNA, 23 bp, Artificial Sequence
  Synthetic
ccgttttttttttttgacaacca

SEQ ID NO: 9222 - DNA, 23 bp, Artificial Sequence
  Synthetic
ccgttttttttttttgccaatat

SEQ ID NO: 9223 - DNA, 23 bp, Artificial Sequence
  Synthetic
ccgttttttttttttctccagta

SEQ ID NO: 9224 - DNA, 23 bp, Artificial Sequence
  Synthetic
ccgttttttttttttgcagtacc

SEQ ID NO: 9225 - DNA, 23 bp, Artificial Sequence
  Synthetic
ccgttttttttttttcaggatga

SEQ ID NO: 9226 - DNA, 23 bp, Artificial Sequence
  Synthetic
ccgttttttttttttccccagta

SEQ ID NO: 9227 - DNA, 23 bp, Artificial Sequence
  Synthetic
ccgttttttttttttcatccaca

SEQ ID NO: 9228 - DNA, 23 bp, Artificial Sequence
  Synthetic
ccgttttttttttttcgcacagt

SEQ ID NO: 9229 - DNA, 23 bp, Artificial Sequence
  Synthetic
ccgttttttttttttggcattta

SEQ ID NO: 9230 - DNA, 23 bp, Artificial Sequence
  Synthetic
ccgttttttttttttagctgcat

SEQ ID NO: 9231 - DNA, 23 bp, Artificial Sequence
  Synthetic
ccgttttttttttttgcagccgt

SEQ ID NO: 9232 - DNA, 23 bp, Artificial Sequence
  Synthetic
ccgttttttttttttaaacatca

SEQ ID NO: 9233 - DNA, 23 bp, Artificial Sequence
  Synthetic
ccgttttttttttttaatctgaa

SEQ ID NO: 9234 - DNA, 23 bp, Artificial Sequence
  Synthetic
ccgttttttttttttagcacaga

SEQ ID NO: 9235 - DNA, 23 bp, Artificial Sequence
  Synthetic
ccgttttttttttttaaagtaac

SEQ ID NO: 9236 - DNA, 23 bp, Artificial Sequence
  Synthetic
ccgttttttttttttaacagtcg

SEQ ID NO: 9237 - DNA, 23 bp, Artificial Sequence
  Synthetic
ccgttttttttttttactactag

SEQ ID NO: 9238 - DNA, 23 bp, Artificial Sequence
  Synthetic
ccgttttttttttttccgagttc

SEQ ID NO: 9239 - DNA, 23 bp, Artificial Sequence
  Synthetic
ccgttttttttttttaagtcttc

SEQ ID NO: 9240 - DNA, 23 bp, Artificial Sequence
  Synthetic
ccgttttttttttttgctgggag

SEQ ID NO: 9241 - DNA, 23 bp, Artificial Sequence
  Synthetic
ccgttttttttttttgaaaacgt

SEQ ID NO: 9242 - DNA, 23 bp, Artificial Sequence
  Synthetic
ccgttttttttttttaacccagg

SEQ ID NO: 9243 - DNA, 23 bp, Artificial Sequence
  Synthetic
ccgttttttttttttacacacag

SEQ ID NO: 9244 - DNA, 23 bp, Artificial Sequence
  Synthetic
ccgttttttttttttcgatccgg

SEQ ID NO: 9245 - DNA, 23 bp, Artificial Sequence
  Synthetic
ccgttttttttttttaccgagag

SEQ ID NO: 9246 - DNA, 23 bp, Artificial Sequence
  Synthetic
ccgttttttttttttaaccactg

SEQ ID NO: 9247 - DNA, 23 bp, Artificial Sequence
  Synthetic
ccgttttttttttttcggtacga

SEQ ID NO: 9248 - DNA, 23 bp, Artificial Sequence
  Synthetic
ccgttttttttttttgtcaagtt

SEQ ID NO: 9249 - DNA, 23 bp, Artificial Sequence
  Synthetic
ccgttttttttttttaaaacttt

SEQ ID NO: 9250 - DNA, 23 bp, Artificial Sequence
  Synthetic
ccgttttttttttttattttctt

SEQ ID NO: 9251 - DNA, 23 bp, Artificial Sequence
  Synthetic
ccgttttttttttttgaggtccc

SEQ ID NO: 9252 - DNA, 23 bp, Artificial Sequence
  Synthetic
ccgttttttttttttaacccttc

SEQ ID NO: 9253 - DNA, 23 bp, Artificial Sequence
  Synthetic
ccgttttttttttttactgtacc

SEQ ID NO: 9254 - DNA, 23 bp, Artificial Sequence
  Synthetic
ccgttttttttttttacaacaaa

SEQ ID NO: 9255 - DNA, 23 bp, Artificial Sequence
  Synthetic
ccgttttttttttttaacaaaat

SEQ ID NO: 9256 - DNA, 23 bp, Artificial Sequence
  Synthetic
ccgttttttttttttcatacagc

SEQ ID NO: 9257 - DNA, 23 bp, Artificial Sequence
  Synthetic
ccgttttttttttttactttcgg

SEQ ID NO: 9258 - DNA, 23 bp, Artificial Sequence
  Synthetic
ccgttttttttttttacaggccg

SEQ ID NO: 9259 - DNA, 23 bp, Artificial Sequence
  Synthetic
ccgttttttttttttggaggccg

SEQ ID NO: 9260 - DNA, 23 bp, Artificial Sequence
  Synthetic
ccgttttttttttttacctgcac

SEQ ID NO: 9261 - DNA, 23 bp, Artificial Sequence
  Synthetic
ccgttttttttttttagcaaaaa

SEQ ID NO: 9262 - DNA, 23 bp, Artificial Sequence
  Synthetic
ccgttttttttttttcacaagat

SEQ ID NO: 9263 - DNA, 23 bp, Artificial Sequence
  Synthetic
ccgttttttttttttagacatag

SEQ ID NO: 9264 - DNA, 23 bp, Artificial Sequence
  Synthetic
ccgttttttttttttacagcacg

SEQ ID NO: 9265 - DNA, 23 bp, Artificial Sequence
  Synthetic
ccgttttttttttttacagccaa

SEQ ID NO: 9266 - DNA, 23 bp, Artificial Sequence
  Synthetic
ccgttttttttttttggcagtca

SEQ ID NO: 9267 - DNA, 23 bp, Artificial Sequence
  Synthetic
ccgttttttttttttacaactag

SEQ ID NO: 9268 - DNA, 23 bp, Artificial Sequence
  Synthetic
ccgttttttttttttaaaccaca

SEQ ID NO: 9269 - DNA, 23 bp, Artificial Sequence
  Synthetic
ccgttttttttttttcagccgtc

SEQ ID NO: 9270 - DNA, 23 bp, Artificial Sequence
  Synthetic
ccgttttttttttttatccctac

SEQ ID NO: 9271 - DNA, 23 bp, Artificial Sequence
  Synthetic
ccgttttttttttttgtaaatcg

SEQ ID NO: 9272 - DNA, 23 bp, Artificial Sequence
  Synthetic
ccgttttttttttttctatcaag

SEQ ID NO: 9273 - DNA, 23 bp, Artificial Sequence
  Synthetic
ccgttttttttttttcaagagca

SEQ ID NO: 9274 - DNA, 23 bp, Artificial Sequence
  Synthetic
ccgttttttttttttaaggggac

SEQ ID NO: 9275 - DNA, 23 bp, Artificial Sequence
  Synthetic
ccgttttttttttttccttgtat

SEQ ID NO: 9276 - DNA, 23 bp, Artificial Sequence
  Synthetic
ccgttttttttttttctgtatag

SEQ ID NO: 9277 - DNA, 23 bp, Artificial Sequence
  Synthetic
ccgttttttttttttgcattccc

SEQ ID NO: 9278 - DNA, 23 bp, Artificial Sequence
  Synthetic
ccgttttttttttttgcaagggc

SEQ ID NO: 9279 - DNA, 23 bp, Artificial Sequence
  Synthetic
ccgttttttttttttggtaacag

SEQ ID NO: 9280 - DNA, 23 bp, Artificial Sequence
  Synthetic
ccgttttttttttttggaatgaa

SEQ ID NO: 9281 - DNA, 23 bp, Artificial Sequence
  Synthetic
ccgttttttttttttacacctgg

SEQ ID NO: 9282 - DNA, 23 bp, Artificial Sequence
  Synthetic
ccgttttttttttttagcacaac

SEQ ID NO: 9283 - DNA, 23 bp, Artificial Sequence
  Synthetic
ccgttttttttttttagcacacc

SEQ ID NO: 9284 - DNA, 23 bp, Artificial Sequence
  Synthetic
ccgttttttttttttcgatgggc

SEQ ID NO: 9285 - DNA, 23 bp, Artificial Sequence
  Synthetic
ccgttttttttttttctaaggct

SEQ ID NO: 9286 - DNA, 23 bp, Artificial Sequence
  Synthetic
ccgttttttttttttaagcctat

SEQ ID NO: 9287 - DNA, 23 bp, Artificial Sequence
  Synthetic
ccgttttttttttttccctggac

SEQ ID NO: 9288 - DNA, 23 bp, Artificial Sequence
  Synthetic
ccgttttttttttttctacgacc

SEQ ID NO: 9289 - DNA, 23 bp, Artificial Sequence
  Synthetic
ccgttttttttttttctgtacaa

SEQ ID NO: 9290 - DNA, 23 bp, Artificial Sequence
  Synthetic
ccgttttttttttttctacggga

SEQ ID NO: 9291 - DNA, 23 bp, Artificial Sequence
  Synthetic
ccgttttttttttttaactccgg

SEQ ID NO: 9292 - DNA, 23 bp, Artificial Sequence
  Synthetic
ccgttttttttttttcaatttct

SEQ ID NO: 9293 - DNA, 23 bp, Artificial Sequence
  Synthetic
ccgttttttttttttgctatctg

SEQ ID NO: 9294 - DNA, 23 bp, Artificial Sequence
  Synthetic
ccgttttttttttttgtgtgctt

SEQ ID NO: 9295 - DNA, 23 bp, Artificial Sequence
  Synthetic
ccgttttttttttttaactatac

SEQ ID NO: 9296 - DNA, 23 bp, Artificial Sequence
  Synthetic
ccgttttttttttttaaccacac

SEQ ID NO: 9297 - DNA, 23 bp, Artificial Sequence
  Synthetic
ccgttttttttttttaaccatac

SEQ ID NO: 9298 - DNA, 23 bp, Artificial Sequence
  Synthetic
ccgttttttttttttaactattc

SEQ ID NO: 9299 - DNA, 23 bp, Artificial Sequence
  Synthetic
ccgttttttttttttaactatac

SEQ ID NO: 9300 - DNA, 23 bp, Artificial Sequence
  Synthetic
ccgttttttttttttaacaacac

SEQ ID NO: 9301 - DNA, 23 bp, Artificial Sequence
  Synthetic
ccgttttttttttttaacagcac

SEQ ID NO: 9302 - DNA, 23 bp, Artificial Sequence
  Synthetic
ccgttttttttttttaactgtac

SEQ ID NO: 9303 - DNA, 23 bp, Artificial Sequence
  Synthetic
ccgttttttttttttatacatac

SEQ ID NO: 9304 - DNA, 23 bp, Artificial Sequence
  Synthetic
ccgttttttttttttcacaagtt

SEQ ID NO: 9305 - DNA, 23 bp, Artificial Sequence
  Synthetic
ccgttttttttttttcttcagtt

SEQ ID NO: 9306 - DNA, 23 bp, Artificial Sequence
  Synthetic
ccgttttttttttttcttcagtt

SEQ ID NO: 9307 - DNA, 23 bp, Artificial Sequence
  Synthetic
ccgttttttttttttcatagccc

SEQ ID NO: 9308 - DNA, 23 bp, Artificial Sequence
  Synthetic
ccgttttttttttttgatagccc

SEQ ID NO: 9309 - DNA, 23 bp, Artificial Sequence
  Synthetic
ccgttttttttttttcacaaatt

SEQ ID NO: 9310 - DNA, 23 bp, Artificial Sequence
  Synthetic
ccgttttttttttttacaaatcc

SEQ ID NO: 9311 - DNA, 23 bp, Artificial Sequence
  Synthetic
ccgttttttttttttcacacaca

SEQ ID NO: 9312 - DNA, 23 bp, Artificial Sequence
  Synthetic
ccgttttttttttttcaaacacc

SEQ ID NO: 9313 - DNA, 23 bp, Artificial Sequence
  Synthetic
ccgttttttttttttggcattca

SEQ ID NO: 9314 - DNA, 23 bp, Artificial Sequence
  Synthetic
ccgttttttttttttcacaggtt

SEQ ID NO: 9315 - DNA, 23 bp, Artificial Sequence
  Synthetic
ccgttttttttttttcacaagtt

SEQ ID NO: 9316 - DNA, 23 bp, Artificial Sequence
  Synthetic
ccgttttttttttttgcattatt

SEQ ID NO: 9317 - DNA, 23 bp, Artificial Sequence
  Synthetic
ccgttttttttttttaaaagaga

SEQ ID NO: 9318 - DNA, 23 bp, Artificial Sequence
  Synthetic
ccgttttttttttttagcaagcc

SEQ ID NO: 9319 - DNA, 23 bp, Artificial Sequence
  Synthetic
ccgttttttttttttatgccctt

SEQ ID NO: 9320 - DNA, 23 bp, Artificial Sequence
  Synthetic
ccgttttttttttttcgaccatg

SEQ ID NO: 9321 - DNA, 23 bp, Artificial Sequence
  Synthetic
ccgttttttttttttcagctggt

SEQ ID NO: 9322 - DNA, 23 bp, Artificial Sequence
  Synthetic
ccgttttttttttttcacatagg

SEQ ID NO: 9323 - DNA, 23 bp, Artificial Sequence
  Synthetic
ccgttttttttttttcagatagg

SEQ ID NO: 9324 - DNA, 23 bp, Artificial Sequence
  Synthetic
ccgttttttttttttacgcgtat

SEQ ID NO: 9325 - DNA, 23 bp, Artificial Sequence
  Synthetic
ccgttttttttttttggcctgat

SEQ ID NO: 9326 - DNA, 23 bp, Artificial Sequence
  Synthetic
ccgttttttttttttctaccata

SEQ ID NO: 9327 - DNA, 23 bp, Artificial Sequence
  Synthetic
ccgttttttttttttagtagtgc

SEQ ID NO: 9328 - DNA, 23 bp, Artificial Sequence
  Synthetic
ccgttttttttttttagtagtgc

SEQ ID NO: 9329 - DNA, 23 bp, Artificial Sequence
  Synthetic
ccgttttttttttttagtacatc

SEQ ID NO: 9330 - DNA, 23 bp, Artificial Sequence
  Synthetic
ccgttttttttttttacaaagtt

SEQ ID NO: 9331 - DNA, 23 bp, Artificial Sequence
  Synthetic
ccgttttttttttttacaaagtt

SEQ ID NO: 9332 - DNA, 23 bp, Artificial Sequence
  Synthetic
ccgttttttttttttgatcactt

SEQ ID NO: 9333 - DNA, 23 bp, Artificial Sequence
  Synthetic
ccgttttttttttttgctcattt

SEQ ID NO: 9334 - DNA, 23 bp, Artificial Sequence
  Synthetic
ccgttttttttttttcacaaacc

SEQ ID NO: 9335 - DNA, 23 bp, Artificial Sequence
  Synthetic
ccgttttttttttttacaaacca

SEQ ID NO: 9336 - DNA, 23 bp, Artificial Sequence
  Synthetic
ccgttttttttttttctccaata

SEQ ID NO: 9337 - DNA, 23 bp, Artificial Sequence
  Synthetic
ccgttttttttttttacctgcac

SEQ ID NO: 9338 - DNA, 23 bp, Artificial Sequence
  Synthetic
ccgttttttttttttatctgcac

SEQ ID NO: 9339 - DNA, 23 bp, Artificial Sequence
  Synthetic
ccgttttttttttttactcaccg

SEQ ID NO: 9340 - DNA, 23 bp, Artificial Sequence
  Synthetic
ccgttttttttttttggtacaat

SEQ ID NO: 9341 - DNA, 23 bp, Artificial Sequence
  Synthetic
ccgttttttttttttcccaccga

SEQ ID NO: 9342 - DNA, 23 bp, Artificial Sequence
  Synthetic
ccgttttttttttttagttggca

SEQ ID NO: 9343 - DNA, 23 bp, Artificial Sequence
  Synthetic
ccgttttttttttttcagtgaat

SEQ ID NO: 9344 - DNA, 23 bp, Artificial Sequence
  Synthetic
ccgttttttttttttcccttatc

SEQ ID NO: 9345 - DNA, 23 bp, Artificial Sequence
  Synthetic
ccgttttttttttttggctgcaa

SEQ ID NO: 9346 - DNA, 23 bp, Artificial Sequence
  Synthetic
ccgttttttttttttactgatac

SEQ ID NO: 9347 - DNA, 23 bp, Artificial Sequence
  Synthetic
ccgttttttttttttacctaata

SEQ ID NO: 9348 - DNA, 23 bp, Artificial Sequence
  Synthetic
ccgttttttttttttggctgtca

SEQ ID NO: 9349 - DNA, 23 bp, Artificial Sequence
  Synthetic
ccgttttttttttttactgggac

SEQ ID NO: 9350 - DNA, 23 bp, Artificial Sequence
  Synthetic
ccgttttttttttttccacatgg

SEQ ID NO: 9351 - DNA, 23 bp, Artificial Sequence
  Synthetic
ccgttttttttttttcccaacaa

SEQ ID NO: 9352 - DNA, 23 bp, Artificial Sequence
  Synthetic
ccgttttttttttttcccaacaa

SEQ ID NO: 9353 - DNA, 23 bp, Artificial Sequence
  Synthetic
ccgttttttttttttgaacaggt

SEQ ID NO: 9354 - DNA, 23 bp, Artificial Sequence
  Synthetic
ccgttttttttttttcagttttg

SEQ ID NO: 9355 - DNA, 23 bp, Artificial Sequence
  Synthetic
ccgttttttttttttcagttttg

SEQ ID NO: 9356 - DNA, 23 bp, Artificial Sequence
  Synthetic
ccgttttttttttttctacctgc

SEQ ID NO: 9357 - DNA, 23 bp, Artificial Sequence
  Synthetic
ccgttttttttttttacatcgtt

SEQ ID NO: 9358 - DNA, 23 bp, Artificial Sequence
  Synthetic
ccgttttttttttttcatcatta

SEQ ID NO: 9359 - DNA, 23 bp, Artificial Sequence
  Synthetic
ccgttttttttttttcccatgcc

SEQ ID NO: 9360 - DNA, 23 bp, Artificial Sequence
  Synthetic
ccgttttttttttttcaagtggt

SEQ ID NO: 9361 - DNA, 23 bp, Artificial Sequence
  Synthetic
ccgttttttttttttaggcatag

SEQ ID NO: 9362 - DNA, 23 bp, Artificial Sequence
  Synthetic
ccgttttttttttttcagactcc

SEQ ID NO: 9363 - DNA, 23 bp, Artificial Sequence
  Synthetic
ccgttttttttttttgccaacac

SEQ ID NO: 9364 - DNA, 23 bp, Artificial Sequence
  Synthetic
ccgttttttttttttagccgctg

SEQ ID NO: 9365 - DNA, 23 bp, Artificial Sequence
  Synthetic
ccgttttttttttttagccatga

SEQ ID NO: 9366 - DNA, 23 bp, Artificial Sequence
  Synthetic
ccgttttttttttttctgcctgt

SEQ ID NO: 9367 - DNA, 23 bp, Artificial Sequence
  Synthetic
ccgttttttttttttcacagttg

SEQ ID NO: 9368 - DNA, 23 bp, Artificial Sequence
  Synthetic
ccgttttttttttttcacagttg

SEQ ID NO: 9369 - DNA, 23 bp, Artificial Sequence
  Synthetic
ccgttttttttttttccaatcag

SEQ ID NO: 9370 - DNA, 23 bp, Artificial Sequence
  Synthetic
ccgttttttttttttcacatggt

SEQ ID NO: 9371 - DNA, 23 bp, Artificial Sequence
  Synthetic
ccgttttttttttttgcatggtt

SEQ ID NO: 9372 - DNA, 23 bp, Artificial Sequence
  Synthetic
ccgttttttttttttaagaattg

SEQ ID NO: 9373 - DNA, 23 bp, Artificial Sequence
  Synthetic
ccgttttttttttttgaaaccca

SEQ ID NO: 9374 - DNA, 23 bp, Artificial Sequence
  Synthetic
ccgttttttttttttgagaccca

SEQ ID NO: 9375 - DNA, 23 bp, Artificial Sequence
  Synthetic
ccgttttttttttttggggtatt

SEQ ID NO: 9376 - DNA, 23 bp, Artificial Sequence
  Synthetic
ccgttttttttttttacagttct

SEQ ID NO: 9377 - DNA, 23 bp, Artificial Sequence
  Synthetic
ccgttttttttttttacagctct

SEQ ID NO: 9378 - DNA, 23 bp, Artificial Sequence
  Synthetic
ccgttttttttttttggaaatcc

SEQ ID NO: 9379 - DNA, 23 bp, Artificial Sequence
  Synthetic
ccgttttttttttttggtaatcc

SEQ ID NO: 9380 - DNA, 23 bp, Artificial Sequence
  Synthetic
ccgttttttttttttctgttcct

SEQ ID NO: 9381 - DNA, 23 bp, Artificial Sequence
  Synthetic
ccgttttttttttttcagaccga

SEQ ID NO: 9382 - DNA, 23 bp, Artificial Sequence
  Synthetic
ccgttttttttttttagcctatc

SEQ ID NO: 9383 - DNA, 23 bp, Artificial Sequence
  Synthetic
ccgttttttttttttgcagaact

SEQ ID NO: 9384 - DNA, 23 bp, Artificial Sequence
  Synthetic
ccgttttttttttttgcagaact

SEQ ID NO: 9385 - DNA, 23 bp, Artificial Sequence
  Synthetic
ccgttttttttttttcactgaac

SEQ ID NO: 9386 - DNA, 23 bp, Artificial Sequence
  Synthetic
ccgttttttttttttaaccgatt

SEQ ID NO: 9387 - DNA, 23 bp, Artificial Sequence
  Synthetic
ccgttttttttttttacactgat

SEQ ID NO: 9388 - DNA, 23 bp, Artificial Sequence
  Synthetic
ccgttttttttttttctatgaca

SEQ ID NO: 9389 - DNA, 23 bp, Artificial Sequence
  Synthetic
ccgttttttttttttagctgagt

SEQ ID NO: 9390 - DNA, 23 bp, Artificial Sequence
  Synthetic
ccgttttttttttttccgagagt

SEQ ID NO: 9391 - DNA, 23 bp, Artificial Sequence
  Synthetic
ccgttttttttttttcttccagt

SEQ ID NO: 9392 - DNA, 23 bp, Artificial Sequence
  Synthetic
ccgttttttttttttcaacaaaa

SEQ ID NO: 9393 - DNA, 23 bp, Artificial Sequence
  Synthetic
ccgttttttttttttataaggat

SEQ ID NO: 9394 - DNA, 23 bp, Artificial Sequence
  Synthetic
ccgttttttttttttaacgcgag

SEQ ID NO: 9395 - DNA, 23 bp, Artificial Sequence
  Synthetic
ccgttttttttttttacggcatt

SEQ ID NO: 9396 - DNA, 23 bp, Artificial Sequence
  Synthetic
ccgttttttttttttcgatgtag

SEQ ID NO: 9397 - DNA, 23 bp, Artificial Sequence
  Synthetic
ccgttttttttttttgcagtacc

SEQ ID NO: 9398 - DNA, 23 bp, Artificial Sequence
  Synthetic
ccgttttttttttttcatccaca

SEQ ID NO: 9399 - DNA, 23 bp, Artificial Sequence
  Synthetic
ccgttttttttttttgcagccgt

SEQ ID NO: 9400 - DNA, 23 bp, Artificial Sequence
  Synthetic
ccgttttttttttttaacaaaat

SEQ ID NO: 9401 - DNA, 23 bp, Artificial Sequence
  Synthetic
ccgttttttttttttcatacagc

SEQ ID NO: 9402 - DNA, 23 bp, Artificial Sequence
  Synthetic
ccgttttttttttttacaggccg

SEQ ID NO: 9403 - DNA, 23 bp, Artificial Sequence
  Synthetic
ccgttttttttttttagcaaaaa

SEQ ID NO: 9404 - DNA, 23 bp, Artificial Sequence
  Synthetic
ccgttttttttttttaactatac

SEQ ID NO: 9405 - DNA, 23 bp, Artificial Sequence
  Synthetic
ccgttttttttttttaaccacac

SEQ ID NO: 9406 - DNA, 23 bp, Artificial Sequence
  Synthetic
ccgttttttttttttaaccatac

SEQ ID NO: 9407 - DNA, 23 bp, Artificial Sequence
  Synthetic
ccgttttttttttttactatgca

SEQ ID NO: 9408 - DNA, 23 bp, Artificial Sequence
  Synthetic
ccgttttttttttttaactatac

SEQ ID NO: 9409 - DNA, 23 bp, Artificial Sequence
  Synthetic
ccgttttttttttttactgtaca

SEQ ID NO: 9410 - DNA, 23 bp, Artificial Sequence
  Synthetic
ccgttttttttttttacagcaca

SEQ ID NO: 9411 - DNA, 23 bp, Artificial Sequence
  Synthetic
ccgttttttttttttaactatac

SEQ ID NO: 9412 - DNA, 23 bp, Artificial Sequence
  Synthetic
ccgttttttttttttaactattc

SEQ ID NO: 9413 - DNA, 23 bp, Artificial Sequence
  Synthetic
ccgttttttttttttcacaagtt

SEQ ID NO: 9414 - DNA, 23 bp, Artificial Sequence
  Synthetic
ccgttttttttttttcttcagtt

SEQ ID NO: 9415 - DNA, 23 bp, Artificial Sequence
  Synthetic
ccgttttttttttttcatagccc

SEQ ID NO: 9416 - DNA, 23 bp, Artificial Sequence
  Synthetic
ccgttttttttttttacctgcac

SEQ ID NO: 9417 - DNA, 23 bp, Artificial Sequence
  Synthetic
ccgttttttttttttgatagccc

SEQ ID NO: 9418 - DNA, 23 bp, Artificial Sequence
  Synthetic
ccgttttttttttttacaaattc

SEQ ID NO: 9419 - DNA, 23 bp, Artificial Sequence
  Synthetic
ccgttttttttttttacaaacac

SEQ ID NO: 9420 - DNA, 23 bp, Artificial Sequence
  Synthetic
ccgttttttttttttggcattca

SEQ ID NO: 9421 - DNA, 23 bp, Artificial Sequence
  Synthetic
ccgttttttttttttggcattca

SEQ ID NO: 9422 - DNA, 23 bp, Artificial Sequence
  Synthetic
ccgttttttttttttcacaagtt

SEQ ID NO: 9423 - DNA, 23 bp, Artificial Sequence
  Synthetic
ccgttttttttttttgcgcatta

SEQ ID NO: 9424 - DNA, 23 bp, Artificial Sequence
  Synthetic
ccgttttttttttttcgcgtacc

SEQ ID NO: 9425 - DNA, 23 bp, Artificial Sequence
  Synthetic
ccgttttttttttttaaagagac

SEQ ID NO: 9426 - DNA, 23 bp, Artificial Sequence
  Synthetic
ccgttttttttttttatgccctt

SEQ ID NO: 9427 - DNA, 23 bp, Artificial Sequence
  Synthetic
ccgttttttttttttacgccctt

SEQ ID NO: 9428 - DNA, 23 bp, Artificial Sequence
  Synthetic
ccgttttttttttttacagctgg

SEQ ID NO: 9429 - DNA, 23 bp, Artificial Sequence
  Synthetic
ccgttttttttttttagctggtt

SEQ ID NO: 9430 - DNA, 23 bp, Artificial Sequence
  Synthetic
ccgttttttttttttgcagctgg

SEQ ID NO: 9431 - DNA, 23 bp, Artificial Sequence
  Synthetic
ccgttttttttttttcacatagg

SEQ ID NO: 9432 - DNA, 23 bp, Artificial Sequence
  Synthetic
ccgttttttttttttctacgcgt

SEQ ID NO: 9433 - DNA, 23 bp, Artificial Sequence
  Synthetic
ccgttttttttttttgattcaca

SEQ ID NO: 9434 - DNA, 23 bp, Artificial Sequence
  Synthetic
ccgttttttttttttctaccata

SEQ ID NO: 9435 - DNA, 23 bp, Artificial Sequence
  Synthetic
ccgttttttttttttgtccgtgg

SEQ ID NO: 9436 - DNA, 23 bp, Artificial Sequence
  Synthetic
ccgttttttttttttccataaag

SEQ ID NO: 9437 - DNA, 23 bp, Artificial Sequence
  Synthetic
ccgttttttttttttgtagtgct

SEQ ID NO: 9438 - DNA, 23 bp, Artificial Sequence
  Synthetic
ccgttttttttttttgagtacat

SEQ ID NO: 9439 - DNA, 23 bp, Artificial Sequence
  Synthetic
ccgttttttttttttaacccatg

SEQ ID NO: 9440 - DNA, 23 bp, Artificial Sequence
  Synthetic
ccgttttttttttttcgcctatg

SEQ ID NO: 9441 - DNA, 23 bp, Artificial Sequence
  Synthetic
ccgttttttttttttgcagaact

SEQ ID NO: 9442 - DNA, 23 bp, Artificial Sequence
  Synthetic
ccgttttttttttttgcagaagc

SEQ ID NO: 9443 - DNA, 23 bp, Artificial Sequence
  Synthetic
ccgttttttttttttacaaagtt

SEQ ID NO: 9444 - DNA, 23 bp, Artificial Sequence
  Synthetic
ccgttttttttttttcacttttg

SEQ ID NO: 9445 - DNA, 23 bp, Artificial Sequence
  Synthetic
ccgttttttttttttcccctatc

SEQ ID NO: 9446 - DNA, 23 bp, Artificial Sequence
  Synthetic
ccgttttttttttttacaaacca

SEQ ID NO: 9447 - DNA, 23 bp, Artificial Sequence
  Synthetic
ccgttttttttttttgcaaacca

SEQ ID NO: 9448 - DNA, 23 bp, Artificial Sequence
  Synthetic
ccgttttttttttttcaccaata

SEQ ID NO: 9449 - DNA, 23 bp, Artificial Sequence
  Synthetic
ccgttttttttttttacaagtgc

SEQ ID NO: 9450 - DNA, 23 bp, Artificial Sequence
  Synthetic
ccgttttttttttttactacctg

SEQ ID NO: 9451 - DNA, 23 bp, Artificial Sequence
  Synthetic
ccgttttttttttttactcaccg

SEQ ID NO: 9452 - DNA, 23 bp, Artificial Sequence
  Synthetic
ccgttttttttttttggtacaat

SEQ ID NO: 9453 - DNA, 23 bp, Artificial Sequence
  Synthetic
ccgttttttttttttcccaccga

SEQ ID NO: 9454 - DNA, 23 bp, Artificial Sequence
  Synthetic
ccgttttttttttttcagtgaat

SEQ ID NO: 9455 - DNA, 23 bp, Artificial Sequence
  Synthetic
ccgttttttttttttacccttat

SEQ ID NO: 9456 - DNA, 23 bp, Artificial Sequence
  Synthetic
ccgttttttttttttggctgcaa

SEQ ID NO: 9457 - DNA, 23 bp, Artificial Sequence
  Synthetic
ccgttttttttttttatctgcac

SEQ ID NO: 9458 - DNA, 23 bp, Artificial Sequence
  Synthetic
ccgttttttttttttaactgcac

SEQ ID NO: 9459 - DNA, 23 bp, Artificial Sequence
  Synthetic
ccgttttttttttttacctaata

SEQ ID NO: 9460 - DNA, 23 bp, Artificial Sequence
  Synthetic
ccgttttttttttttaaagcggg

SEQ ID NO: 9461 - DNA, 23 bp, Artificial Sequence
  Synthetic
ccgttttttttttttccacatgg

SEQ ID NO: 9462 - DNA, 23 bp, Artificial Sequence
  Synthetic
ccgttttttttttttccaacaac

SEQ ID NO: 9463 - DNA, 23 bp, Artificial Sequence
  Synthetic
ccgttttttttttttgaacaggt

SEQ ID NO: 9464 - DNA, 23 bp, Artificial Sequence
  Synthetic
ccgttttttttttttccaatgtg

SEQ ID NO: 9465 - DNA, 23 bp, Artificial Sequence
  Synthetic
ccgttttttttttttcagttttg

SEQ ID NO: 9466 - DNA, 23 bp, Artificial Sequence
  Synthetic
ccgttttttttttttcagttttg

SEQ ID NO: 9467 - DNA, 23 bp, Artificial Sequence
  Synthetic
ccgttttttttttttacatactt

SEQ ID NO: 9468 - DNA, 23 bp, Artificial Sequence
  Synthetic
ccgttttttttttttacatactt

SEQ ID NO: 9469 - DNA, 23 bp, Artificial Sequence
  Synthetic
ccgttttttttttttacatcgtt

SEQ ID NO: 9470 - DNA, 23 bp, Artificial Sequence
  Synthetic
ccgttttttttttttatcatcat

SEQ ID NO: 9471 - DNA, 23 bp, Artificial Sequence
  Synthetic
ccgttttttttttttcccatgct

SEQ ID NO: 9472 - DNA, 23 bp, Artificial Sequence
  Synthetic
ccgttttttttttttaaagaagt

SEQ ID NO: 9473 - DNA, 23 bp, Artificial Sequence
  Synthetic
ccgttttttttttttcaagtggt

SEQ ID NO: 9474 - DNA, 23 bp, Artificial Sequence
  Synthetic
ccgttttttttttttaggcatag

SEQ ID NO: 9475 - DNA, 23 bp, Artificial Sequence
  Synthetic
ccgttttttttttttcagactcc

SEQ ID NO: 9476 - DNA, 23 bp, Artificial Sequence
  Synthetic
ccgttttttttttttcagattcc

SEQ ID NO: 9477 - DNA, 23 bp, Artificial Sequence
  Synthetic
ccgttttttttttttccacacac

SEQ ID NO: 9478 - DNA, 23 bp, Artificial Sequence
  Synthetic
ccgttttttttttttctacctgc

SEQ ID NO: 9479 - DNA, 23 bp, Artificial Sequence
  Synthetic
ccgttttttttttttctacctgc

SEQ ID NO: 9480 - DNA, 23 bp, Artificial Sequence
  Synthetic
ccgttttttttttttcaacatca

SEQ ID NO: 9481 - DNA, 23 bp, Artificial Sequence
  Synthetic
ccgttttttttttttaggcatag

SEQ ID NO: 9482 - DNA, 23 bp, Artificial Sequence
  Synthetic
ccgttttttttttttgtctgtca

SEQ ID NO: 9483 - DNA, 23 bp, Artificial Sequence
  Synthetic
ccgttttttttttttcacagttg

SEQ ID NO: 9484 - DNA, 23 bp, Artificial Sequence
  Synthetic
ccgttttttttttttatccaatc

SEQ ID NO: 9485 - DNA, 23 bp, Artificial Sequence
  Synthetic
ccgttttttttttttacatggtt

SEQ ID NO: 9486 - DNA, 23 bp, Artificial Sequence
  Synthetic
ccgttttttttttttagaattgc

SEQ ID NO: 9487 - DNA, 23 bp, Artificial Sequence
  Synthetic
ccgttttttttttttgaaaccca

SEQ ID NO: 9488 - DNA, 23 bp, Artificial Sequence
  Synthetic
ccgttttttttttttgagaccca

SEQ ID NO: 9489 - DNA, 23 bp, Artificial Sequence
  Synthetic
ccgttttttttttttgagaccca

SEQ ID NO: 9490 - DNA, 23 bp, Artificial Sequence
  Synthetic
ccgttttttttttttggggtatt

SEQ ID NO: 9491 - DNA, 23 bp, Artificial Sequence
  Synthetic
ccgttttttttttttggtaatcc

SEQ ID NO: 9492 - DNA, 23 bp, Artificial Sequence
  Synthetic
ccgttttttttttttctgttcct

SEQ ID NO: 9493 - DNA, 23 bp, Artificial Sequence
  Synthetic
ccgttttttttttttgcctatcc

SEQ ID NO: 9494 - DNA, 23 bp, Artificial Sequence
  Synthetic
ccgttttttttttttgcagaact

SEQ ID NO: 9495 - DNA, 23 bp, Artificial Sequence
  Synthetic
ccgttttttttttttaaccgatt

SEQ ID NO: 9496 - DNA, 23 bp, Artificial Sequence
  Synthetic
ccgttttttttttttaacactga

SEQ ID NO: 9497 - DNA, 23 bp, Artificial Sequence
  Synthetic
ccgttttttttttttaccgattt

SEQ ID NO: 9498 - DNA, 23 bp, Artificial Sequence
  Synthetic
ccgttttttttttttatgctttg

SEQ ID NO: 9499 - DNA, 23 bp, Artificial Sequence
  Synthetic
ccgttttttttttttcactaaaa

SEQ ID NO: 9500 - DNA, 23 bp, Artificial Sequence
  Synthetic
ccgttttttttttttctactaaa

SEQ ID NO: 9501 - DNA, 23 bp, Artificial Sequence
  Synthetic
ccgttttttttttttagaaagca

SEQ ID NO: 9502 - DNA, 23 bp, Artificial Sequence
  Synthetic
ccgttttttttttttccactgaa

SEQ ID NO: 9503 - DNA, 23 bp, Artificial Sequence
  Synthetic
ccgttttttttttttcagcaggt

SEQ ID NO: 9504 - DNA, 23 bp, Artificial Sequence
  Synthetic
ccgttttttttttttcaactaaa

SEQ ID NO: 9505 - DNA, 23 bp, Artificial Sequence
  Synthetic
ccgttttttttttttgctgcaaa

SEQ ID NO: 9506 - DNA, 23 bp, Artificial Sequence
  Synthetic
ccgttttttttttttcttccagt

SEQ ID NO: 9507 - DNA, 23 bp, Artificial Sequence
  Synthetic
ccgttttttttttttagctgagt

SEQ ID NO: 9508 - DNA, 23 bp, Artificial Sequence
  Synthetic
ccgttttttttttttagctgaga

SEQ ID NO: 9509 - DNA, 23 bp, Artificial Sequence
  Synthetic
ccgttttttttttttcttccagt

SEQ ID NO: 9510 - DNA, 23 bp, Artificial Sequence
  Synthetic
ccgttttttttttttccagtcaa

SEQ ID NO: 9511 - DNA, 23 bp, Artificial Sequence
  Synthetic
ccgttttttttttttcagctatg

SEQ ID NO: 9512 - DNA, 23 bp, Artificial Sequence
  Synthetic
ccgttttttttttttgcaactta

SEQ ID NO: 9513 - DNA, 23 bp, Artificial Sequence
  Synthetic
ccgttttttttttttcaatgcaa

SEQ ID NO: 9514 - DNA, 23 bp, Artificial Sequence
  Synthetic
ccgttttttttttttaacaacca

SEQ ID NO: 9515 - DNA, 23 bp, Artificial Sequence
  Synthetic
ccgttttttttttttcaatcagc

SEQ ID NO: 9516 - DNA, 23 bp, Artificial Sequence
  Synthetic
ccgttttttttttttgcaatcag

SEQ ID NO: 9517 - DNA, 23 bp, Artificial Sequence
  Synthetic
ccgttttttttttttataaggat

SEQ ID NO: 9518 - DNA, 23 bp, Artificial Sequence
  Synthetic
ccgttttttttttttcaccattg

SEQ ID NO: 9519 - DNA, 23 bp, Artificial Sequence
  Synthetic
ccgttttttttttttaacgcgag

SEQ ID NO: 9520 - DNA, 23 bp, Artificial Sequence
  Synthetic
ccgttttttttttttagccacaa

SEQ ID NO: 9521 - DNA, 23 bp, Artificial Sequence
  Synthetic
ccgttttttttttttacggcatt

SEQ ID NO: 9522 - DNA, 23 bp, Artificial Sequence
  Synthetic
ccgttttttttttttaccagcta

SEQ ID NO: 9523 - DNA, 23 bp, Artificial Sequence
  Synthetic
ccgttttttttttttaaactcag

SEQ ID NO: 9524 - DNA, 23 bp, Artificial Sequence
  Synthetic
ccgttttttttttttcgatgtag

SEQ ID NO: 9525 - DNA, 23 bp, Artificial Sequence
  Synthetic
ccgttttttttttttgacaacca

SEQ ID NO: 9526 - DNA, 23 bp, Artificial Sequence
  Synthetic
ccgttttttttttttcacacagt

SEQ ID NO: 9527 - DNA, 23 bp, Artificial Sequence
  Synthetic
ccgttttttttttttgtcttatg

SEQ ID NO: 9528 - DNA, 23 bp, Artificial Sequence
  Synthetic
ccgttttttttttttgcagccgt

SEQ ID NO: 9529 - DNA, 23 bp, Artificial Sequence
  Synthetic
ccgttttttttttttcagcatgg

SEQ ID NO: 9530 - DNA, 23 bp, Artificial Sequence
  Synthetic
ccgttttttttttttctaaacat

SEQ ID NO: 9531 - DNA, 23 bp, Artificial Sequence
  Synthetic
ccgttttttttttttcaacaaaa

SEQ ID NO: 9532 - DNA, 23 bp, Artificial Sequence
  Synthetic
ccgttttttttttttgaatccca

SEQ ID NO: 9533 - DNA, 23 bp, Artificial Sequence
  Synthetic
ccgttttttttttttaacaaaaa

SEQ ID NO: 9534 - DNA, 23 bp, Artificial Sequence
  Synthetic
ccgttttttttttttcatacagc

SEQ ID NO: 9535 - DNA, 23 bp, Artificial Sequence
  Synthetic
ccgttttttttttttacattcgg

SEQ ID NO: 9536 - DNA, 23 bp, Artificial Sequence
  Synthetic
ccgttttttttttttcaggccgg

SEQ ID NO: 9537 - DNA, 23 bp, Artificial Sequence
  Synthetic
ccgttttttttttttcacaagat

SEQ ID NO: 9538 - DNA, 23 bp, Artificial Sequence
  Synthetic
ccgttttttttttttcacaagtt

SEQ ID NO: 9539 - DNA, 23 bp, Artificial Sequence
  Synthetic
ccgttttttttttttcttcagtt

SEQ ID NO: 9540 - DNA, 23 bp, Artificial Sequence
  Synthetic
ccgttttttttttttcatagccc

SEQ ID NO: 9541 - DNA, 23 bp, Artificial Sequence
  Synthetic
ccgttttttttttttacaggagt

SEQ ID NO: 9542 - DNA, 23 bp, Artificial Sequence
  Synthetic
ccgttttttttttttgctacctg

SEQ ID NO: 9543 - DNA, 23 bp, Artificial Sequence
  Synthetic
ccgttttttttttttatctgcac

SEQ ID NO: 9544 - DNA, 23 bp, Artificial Sequence
  Synthetic
ccgttttttttttttgatagccc

SEQ ID NO: 9545 - DNA, 23 bp, Artificial Sequence
  Synthetic
ccgttttttttttttcacaaatt

SEQ ID NO: 9546 - DNA, 23 bp, Artificial Sequence
  Synthetic
ccgttttttttttttacaaattc

SEQ ID NO: 9547 - DNA, 23 bp, Artificial Sequence
  Synthetic
ccgttttttttttttggcattca

SEQ ID NO: 9548 - DNA, 23 bp, Artificial Sequence
  Synthetic
ccgttttttttttttcacaagtt

SEQ ID NO: 9549 - DNA, 23 bp, Artificial Sequence
  Synthetic
ccgttttttttttttgccctttt

SEQ ID NO: 9550 - DNA, 23 bp, Artificial Sequence
  Synthetic
ccgttttttttttttacagctgg

SEQ ID NO: 9551 - DNA, 23 bp, Artificial Sequence
  Synthetic
ccgttttttttttttccctctgg

SEQ ID NO: 9552 - DNA, 23 bp, Artificial Sequence
  Synthetic
ccgttttttttttttcacatagg

SEQ ID NO: 9553 - DNA, 23 bp, Artificial Sequence
  Synthetic
ccgttttttttttttccatcatc

SEQ ID NO: 9554 - DNA, 23 bp, Artificial Sequence
  Synthetic
ccgttttttttttttccatcttt

SEQ ID NO: 9555 - DNA, 23 bp, Artificial Sequence
  Synthetic
ccgttttttttttttgagctaca

SEQ ID NO: 9556 - DNA, 23 bp, Artificial Sequence
  Synthetic
ccgttttttttttttaagggatt

SEQ ID NO: 9557 - DNA, 23 bp, Artificial Sequence
  Synthetic
ccgttttttttttttcacttttg

SEQ ID NO: 9558 - DNA, 23 bp, Artificial Sequence
  Synthetic
ccgttttttttttttcgaaggca

SEQ ID NO: 9559 - DNA, 23 bp, Artificial Sequence
  Synthetic
ccgttttttttttttcacaaacc

SEQ ID NO: 9560 - DNA, 23 bp, Artificial Sequence
  Synthetic
ccgttttttttttttgtaaacca

SEQ ID NO: 9561 - DNA, 23 bp, Artificial Sequence
  Synthetic
ccgttttttttttttcgccaata

SEQ ID NO: 9562 - DNA, 23 bp, Artificial Sequence
  Synthetic
ccgttttttttttttacaagtgc

SEQ ID NO: 9563 - DNA, 23 bp, Artificial Sequence
  Synthetic
ccgttttttttttttactacctg

SEQ ID NO: 9564 - DNA, 23 bp, Artificial Sequence
  Synthetic
ccgttttttttttttatctgcac

SEQ ID NO: 9565 - DNA, 23 bp, Artificial Sequence
  Synthetic
ccgttttttttttttactcaccg

SEQ ID NO: 9566 - DNA, 23 bp, Artificial Sequence
  Synthetic
ccgttttttttttttggtacaat

SEQ ID NO: 9567 - DNA, 23 bp, Artificial Sequence
  Synthetic
ccgttttttttttttaacccacc

SEQ ID NO: 9568 - DNA, 23 bp, Artificial Sequence
  Synthetic
ccgttttttttttttactcaccg

SEQ ID NO: 9569 - DNA, 23 bp, Artificial Sequence
  Synthetic
ccgttttttttttttcagtgaat

SEQ ID NO: 9570 - DNA, 23 bp, Artificial Sequence
  Synthetic
ccgttttttttttttaagcccaa

SEQ ID NO: 9571 - DNA, 23 bp, Artificial Sequence
  Synthetic
ccgttttttttttttcggctgca

SEQ ID NO: 9572 - DNA, 23 bp, Artificial Sequence
  Synthetic
ccgttttttttttttacctaata

SEQ ID NO: 9573 - DNA, 23 bp, Artificial Sequence
  Synthetic
ccgttttttttttttccacatgg

SEQ ID NO: 9574 - DNA, 23 bp, Artificial Sequence
  Synthetic
ccgttttttttttttgccaatat

SEQ ID NO: 9575 - DNA, 23 bp, Artificial Sequence
  Synthetic
ccgttttttttttttccaacaac

SEQ ID NO: 9576 - DNA, 23 bp, Artificial Sequence
  Synthetic
ccgttttttttttttcctatctc

SEQ ID NO: 9577 - DNA, 23 bp, Artificial Sequence
  Synthetic
ccgttttttttttttgaacaggt

SEQ ID NO: 9578 - DNA, 23 bp, Artificial Sequence
  Synthetic
ccgttttttttttttcagttttg

SEQ ID NO: 9579 - DNA, 23 bp, Artificial Sequence
  Synthetic
ccgttttttttttttcagttttg

SEQ ID NO: 9580 - DNA, 23 bp, Artificial Sequence
  Synthetic
ccgttttttttttttacctgcac

SEQ ID NO: 9581 - DNA, 23 bp, Artificial Sequence
  Synthetic
ccgttttttttttttccatcatt

SEQ ID NO: 9582 - DNA, 23 bp, Artificial Sequence
  Synthetic
ccgttttttttttttaggcatag

SEQ ID NO: 9583 - DNA, 23 bp, Artificial Sequence
  Synthetic
ccgttttttttttttcagactcc

SEQ ID NO: 9584 - DNA, 23 bp, Artificial Sequence
  Synthetic
ccgttttttttttttcaacatca

SEQ ID NO: 9585 - DNA, 23 bp, Artificial Sequence
  Synthetic
ccgttttttttttttctgcctgt

SEQ ID NO: 9586 - DNA, 23 bp, Artificial Sequence
  Synthetic
ccgttttttttttttgtctgtca

SEQ ID NO: 9587 - DNA, 23 bp, Artificial Sequence
  Synthetic
ccgttttttttttttcacagttg

SEQ ID NO: 9588 - DNA, 23 bp, Artificial Sequence
  Synthetic
ccgttttttttttttatccaatc

SEQ ID NO: 9589 - DNA, 23 bp, Artificial Sequence
  Synthetic
ccgttttttttttttacatggtt

SEQ ID NO: 9590 - DNA, 23 bp, Artificial Sequence
  Synthetic
ccgttttttttttttagaattgc

SEQ ID NO: 9591 - DNA, 23 bp, Artificial Sequence
  Synthetic
ccgttttttttttttaaagtgtc

SEQ ID NO: 9592 - DNA, 23 bp, Artificial Sequence
  Synthetic
ccgttttttttttttgaaaccca

SEQ ID NO: 9593 - DNA, 23 bp, Artificial Sequence
  Synthetic
ccgttttttttttttggggtatt

SEQ ID NO: 9594 - DNA, 23 bp, Artificial Sequence
  Synthetic
ccgttttttttttttaaacggaa

SEQ ID NO: 9595 - DNA, 23 bp, Artificial Sequence
  Synthetic
ccgttttttttttttggaaatcc

SEQ ID NO: 9596 - DNA, 23 bp, Artificial Sequence
  Synthetic
ccgttttttttttttctgttcct

SEQ ID NO: 9597 - DNA, 23 bp, Artificial Sequence
  Synthetic
ccgttttttttttttcagaccga

SEQ ID NO: 9598 - DNA, 23 bp, Artificial Sequence
  Synthetic
ccgttttttttttttagcctatc

SEQ ID NO: 9599 - DNA, 23 bp, Artificial Sequence
  Synthetic
ccgttttttttttttggcggaac

SEQ ID NO: 9600 - DNA, 23 bp, Artificial Sequence
  Synthetic
ccgttttttttttttctcaatag

SEQ ID NO: 9601 - DNA, 23 bp, Artificial Sequence
  Synthetic
ccgttttttttttttaaccgatt

SEQ ID NO: 9602 - DNA, 23 bp, Artificial Sequence
  Synthetic
ccgttttttttttttactgattt

SEQ ID NO: 9603 - DNA, 23 bp, Artificial Sequence
  Synthetic
ccgttttttttttttgctgcaaa

SEQ ID NO: 9604 - DNA, 23 bp, Artificial Sequence
  Synthetic
ccgttttttttttttcttccagt

SEQ ID NO: 9605 - DNA, 23 bp, Artificial Sequence
  Synthetic
ccgttttttttttttgctgagtg

SEQ ID NO: 9606 - DNA, 23 bp, Artificial Sequence
  Synthetic
ccgttttttttttttcttccagt

SEQ ID NO: 9607 - DNA, 23 bp, Artificial Sequence
  Synthetic
ccgttttttttttttcagctatg

SEQ ID NO: 9608 - DNA, 23 bp, Artificial Sequence
  Synthetic
ccgttttttttttttgcaactta

SEQ ID NO: 9609 - DNA, 23 bp, Artificial Sequence
  Synthetic
ccgttttttttttttcaatgcaa

SEQ ID NO: 9610 - DNA, 23 bp, Artificial Sequence
  Synthetic
ccgttttttttttttacaaccag

SEQ ID NO: 9611 - DNA, 23 bp, Artificial Sequence
  Synthetic
ccgttttttttttttaacaaaat

SEQ ID NO: 9612 - DNA, 23 bp, Artificial Sequence
  Synthetic
ccgttttttttttttcatacagc

SEQ ID NO: 9613 - DNA, 23 bp, Artificial Sequence
  Synthetic
ccgttttttttttttacaggccg

SEQ ID NO: 9614 - DNA, 23 bp, Artificial Sequence
  Synthetic
ccgttttttttttttctacctgc

SEQ ID NO: 9615 - DNA, 23 bp, Artificial Sequence
  Synthetic
ccgttttttttttttgctcaata

SEQ ID NO: 9616 - DNA, 23 bp, Artificial Sequence
  Synthetic
ccgttttttttttttgcaaaaat

SEQ ID NO: 9617 - DNA, 23 bp, Artificial Sequence
  Synthetic
ccgttttttttttttaacaatac

SEQ ID NO: 9618 - DNA, 23 bp, Artificial Sequence
  Synthetic
ccgttttttttttttcacaagat

SEQ ID NO: 9619 - DNA, 23 bp, Artificial Sequence
  Synthetic
ccgttttttttttttgtgctcac

SEQ ID NO: 9620 - DNA, 23 bp, Artificial Sequence
  Synthetic
ccgttttttttttttgtgctctc

SEQ ID NO: 9621 - DNA, 23 bp, Artificial Sequence
  Synthetic
ccgttttttttttttgtgctctc

SEQ ID NO: 9622 - DNA, 23 bp, Artificial Sequence
  Synthetic
ccgttttttttttttgtgctctc

SEQ ID NO: 9623 - DNA, 23 bp, Artificial Sequence
  Synthetic
ccgttttttttttttgtgctctc

SEQ ID NO: 9624 - DNA, 23 bp, Artificial Sequence
  Synthetic
ccgttttttttttttagagctcc

SEQ ID NO: 9625 - DNA, 23 bp, Artificial Sequence
  Synthetic
ccgttttttttttttggcataca

SEQ ID NO: 9626 - DNA, 23 bp, Artificial Sequence
  Synthetic
ccgttttttttttttggggaatg

SEQ ID NO: 9627 - DNA, 23 bp, Artificial Sequence
  Synthetic
ccgttttttttttttggggaatg

SEQ ID NO: 9628 - DNA, 23 bp, Artificial Sequence
  Synthetic
ccgttttttttttttagatcatg

SEQ ID NO: 9629 - DNA, 23 bp, Artificial Sequence
  Synthetic
ccgttttttttttttagatcatg

SEQ ID NO: 9630 - DNA, 23 bp, Artificial Sequence
  Synthetic
ccgttttttttttttcccgacct

SEQ ID NO: 9631 - DNA, 23 bp, Artificial Sequence
  Synthetic
ccgttttttttttttccggcaag

SEQ ID NO: 9632 - DNA, 23 bp, Artificial Sequence
  Synthetic
ccgttttttttttttatgcagca

SEQ ID NO: 9633 - DNA, 23 bp, Artificial Sequence
  Synthetic
ccgttttttttttttatgcagca

SEQ ID NO: 9634 - DNA, 23 bp, Artificial Sequence
  Synthetic
ccgttttttttttttgggagctc

SEQ ID NO: 9635 - DNA, 23 bp, Artificial Sequence
  Synthetic
ccgttttttttttttgggagctc

SEQ ID NO: 9636 - DNA, 23 bp, Artificial Sequence
  Synthetic
ccgttttttttttttaggagctc

SEQ ID NO: 9637 - DNA, 23 bp, Artificial Sequence
  Synthetic
ccgttttttttttttcagttcaa

SEQ ID NO: 9638 - DNA, 23 bp, Artificial Sequence
  Synthetic
ccgttttttttttttaagttcaa

SEQ ID NO: 9639 - DNA, 23 bp, Artificial Sequence
  Synthetic
ccgttttttttttttaaggggtg

SEQ ID NO: 9640 - DNA, 23 bp, Artificial Sequence
  Synthetic
ccgttttttttttttaaggggtg

SEQ ID NO: 9641 - DNA, 23 bp, Artificial Sequence
  Synthetic
ccgttttttttttttagcctgga

SEQ ID NO: 9642 - DNA, 23 bp, Artificial Sequence
  Synthetic
ccgttttttttttttcggtgaag

SEQ ID NO: 9643 - DNA, 23 bp, Artificial Sequence
  Synthetic
ccgttttttttttttctcacggg

SEQ ID NO: 9644 - DNA, 23 bp, Artificial Sequence
  Synthetic
ccgttttttttttttctacaaac

SEQ ID NO: 9645 - DNA, 23 bp, Artificial Sequence
  Synthetic
ccgttttttttttttctttccag

SEQ ID NO: 9646 - DNA, 23 bp, Artificial Sequence
  Synthetic
ccgttttttttttttccgcgcgc

SEQ ID NO: 9647 - DNA, 23 bp, Artificial Sequence
  Synthetic
ccgttttttttttttctggacga

SEQ ID NO: 9648 - DNA, 23 bp, Artificial Sequence
  Synthetic
ccgttttttttttttggtccgag

SEQ ID NO: 9649 - DNA, 23 bp, Artificial Sequence
  Synthetic
ccgttttttttttttccgcggga

SEQ ID NO: 9650 - DNA, 23 bp, Artificial Sequence
  Synthetic
ccgttttttttttttcatccacc

SEQ ID NO: 9651 - DNA, 23 bp, Artificial Sequence
  Synthetic
ccgttttttttttttcgcccacg

SEQ ID NO: 9652 - DNA, 23 bp, Artificial Sequence
  Synthetic
ccgttttttttttttatccccct

SEQ ID NO: 9653 - DNA, 23 bp, Artificial Sequence
  Synthetic
ccgttttttttttttacgctctc

SEQ ID NO: 9654 - DNA, 23 bp, Artificial Sequence
  Synthetic
ccgttttttttttttgacatcgt

SEQ ID NO: 9655 - DNA, 23 bp, Artificial Sequence
  Synthetic
ccgttttttttttttaactatac

SEQ ID NO: 9656 - DNA, 23 bp, Artificial Sequence
  Synthetic
ccgttttttttttttaaccacac

SEQ ID NO: 9657 - DNA, 23 bp, Artificial Sequence
  Synthetic
ccgttttttttttttaaccatac

SEQ ID NO: 9658 - DNA, 23 bp, Artificial Sequence
  Synthetic
ccgttttttttttttactatgca

SEQ ID NO: 9659 - DNA, 23 bp, Artificial Sequence
  Synthetic
ccgttttttttttttactataca

SEQ ID NO: 9660 - DNA, 23 bp, Artificial Sequence
  Synthetic
ccgttttttttttttaactatac

SEQ ID NO: 9661 - DNA, 23 bp, Artificial Sequence
  Synthetic
ccgttttttttttttactgtaca

SEQ ID NO: 9662 - DNA, 23 bp, Artificial Sequence
  Synthetic
ccgttttttttttttacagcaca

SEQ ID NO: 9663 - DNA, 23 bp, Artificial Sequence
  Synthetic
ccgttttttttttttacatactt

SEQ ID NO: 9664 - DNA, 23 bp, Artificial Sequence
  Synthetic
ccgttttttttttttcacaagtt

SEQ ID NO: 9665 - DNA, 23 bp, Artificial Sequence
  Synthetic
ccgttttttttttttcttcagtt

SEQ ID NO: 9666 - DNA, 23 bp, Artificial Sequence
  Synthetic
ccgttttttttttttcatagccc

SEQ ID NO: 9667 - DNA, 23 bp, Artificial Sequence
  Synthetic
ccgttttttttttttacaggagt

SEQ ID NO: 9668 - DNA, 23 bp, Artificial Sequence
  Synthetic
ccgttttttttttttgctacctg

SEQ ID NO: 9669 - DNA, 23 bp, Artificial Sequence
  Synthetic
ccgttttttttttttatctgcac

SEQ ID NO: 9670 - DNA, 23 bp, Artificial Sequence
  Synthetic
ccgttttttttttttgatagccc

SEQ ID NO: 9671 - DNA, 23 bp, Artificial Sequence
  Synthetic
ccgttttttttttttcacaaatt

SEQ ID NO: 9672 - DNA, 23 bp, Artificial Sequence
  Synthetic
ccgttttttttttttacaaattc

SEQ ID NO: 9673 - DNA, 23 bp, Artificial Sequence
  Synthetic
ccgttttttttttttacaaacac

SEQ ID NO: 9674 - DNA, 23 bp, Artificial Sequence
  Synthetic
ccgttttttttttttggcattca

SEQ ID NO: 9675 - DNA, 23 bp, Artificial Sequence
  Synthetic
ccgttttttttttttcacaggtt

SEQ ID NO: 9676 - DNA, 23 bp, Artificial Sequence
  Synthetic
ccgttttttttttttcacaagtt

SEQ ID NO: 9677 - DNA, 23 bp, Artificial Sequence
  Synthetic
ccgttttttttttttgcattatt

SEQ ID NO: 9678 - DNA, 23 bp, Artificial Sequence
  Synthetic
ccgttttttttttttcgcgtacc

SEQ ID NO: 9679 - DNA, 23 bp, Artificial Sequence
  Synthetic
ccgttttttttttttagccaagc

SEQ ID NO: 9680 - DNA, 23 bp, Artificial Sequence
  Synthetic
ccgttttttttttttaaaagaga

SEQ ID NO: 9681 - DNA, 23 bp, Artificial Sequence
  Synthetic
ccgttttttttttttgaaagaga

SEQ ID NO: 9682 - DNA, 23 bp, Artificial Sequence
  Synthetic
ccgttttttttttttgcaagccc

SEQ ID NO: 9683 - DNA, 23 bp, Artificial Sequence
  Synthetic
ccgttttttttttttatgccctt

SEQ ID NO: 9684 - DNA, 23 bp, Artificial Sequence
  Synthetic
ccgttttttttttttatgccctt

SEQ ID NO: 9685 - DNA, 23 bp, Artificial Sequence
  Synthetic
ccgttttttttttttcgaccatg

SEQ ID NO: 9686 - DNA, 23 bp, Artificial Sequence
  Synthetic
ccgttttttttttttacagctgg

SEQ ID NO: 9687 - DNA, 23 bp, Artificial Sequence
  Synthetic
ccgttttttttttttagctggtt

SEQ ID NO: 9688 - DNA, 23 bp, Artificial Sequence
  Synthetic
ccgttttttttttttccctctgg

SEQ ID NO: 9689 - DNA, 23 bp, Artificial Sequence
  Synthetic
ccgttttttttttttcacatagg

SEQ ID NO: 9690 - DNA, 23 bp, Artificial Sequence
  Synthetic
ccgttttttttttttcacatagg

SEQ ID NO: 9691 - DNA, 23 bp, Artificial Sequence
  Synthetic
ccgttttttttttttccatcatc

SEQ ID NO: 9692 - DNA, 23 bp, Artificial Sequence
  Synthetic
ccgttttttttttttctacgcgt

SEQ ID NO: 9693 - DNA, 23 bp, Artificial Sequence
  Synthetic
ccgttttttttttttgattcaca

SEQ ID NO: 9694 - DNA, 23 bp, Artificial Sequence
  Synthetic
ccgttttttttttttagacacgt

SEQ ID NO: 9695 - DNA, 23 bp, Artificial Sequence
  Synthetic
ccgttttttttttttctaccata

SEQ ID NO: 9696 - DNA, 23 bp, Artificial Sequence
  Synthetic
ccgttttttttttttccatcttt

SEQ ID NO: 9697 - DNA, 23 bp, Artificial Sequence
  Synthetic
ccgttttttttttttccataaag

SEQ ID NO: 9698 - DNA, 23 bp, Artificial Sequence
  Synthetic
ccgttttttttttttgtagtgct

SEQ ID NO: 9699 - DNA, 23 bp, Artificial Sequence
  Synthetic
ccgttttttttttttgagctaca

SEQ ID NO: 9700 - DNA, 23 bp, Artificial Sequence
  Synthetic
ccgttttttttttttctagtaca

SEQ ID NO: 9701 - DNA, 23 bp, Artificial Sequence
  Synthetic
ccgttttttttttttaagggatt

SEQ ID NO: 9702 - DNA, 23 bp, Artificial Sequence
  Synthetic
ccgttttttttttttaacccatg

SEQ ID NO: 9703 - DNA, 23 bp, Artificial Sequence
  Synthetic
ccgttttttttttttagcctatg

SEQ ID NO: 9704 - DNA, 23 bp, Artificial Sequence
  Synthetic
ccgttttttttttttgcagaagc

SEQ ID NO: 9705 - DNA, 23 bp, Artificial Sequence
  Synthetic
ccgttttttttttttacaaagtt

SEQ ID NO: 9706 - DNA, 23 bp, Artificial Sequence
  Synthetic
ccgttttttttttttacaaagtt

SEQ ID NO: 9707 - DNA, 23 bp, Artificial Sequence
  Synthetic
ccgttttttttttttggagtgaa

SEQ ID NO: 9708 - DNA, 23 bp, Artificial Sequence
  Synthetic
ccgttttttttttttcactggta

SEQ ID NO: 9709 - DNA, 23 bp, Artificial Sequence
  Synthetic
ccgttttttttttttcctcaagg

SEQ ID NO: 9710 - DNA, 23 bp, Artificial Sequence
  Synthetic
ccgttttttttttttcccaagtt

SEQ ID NO: 9711 - DNA, 23 bp, Artificial Sequence
  Synthetic
ccgttttttttttttcacttttg

SEQ ID NO: 9712 - DNA, 23 bp, Artificial Sequence
  Synthetic
ccgttttttttttttcgaaggca

SEQ ID NO: 9713 - DNA, 23 bp, Artificial Sequence
  Synthetic
ccgttttttttttttaataggtc

SEQ ID NO: 9714 - DNA, 23 bp, Artificial Sequence
  Synthetic
ccgttttttttttttcccctatc

SEQ ID NO: 9715 - DNA, 23 bp, Artificial Sequence
  Synthetic
ccgttttttttttttcacaaacc

SEQ ID NO: 9716 - DNA, 23 bp, Artificial Sequence
  Synthetic
ccgttttttttttttgtaaacca

SEQ ID NO: 9717 - DNA, 23 bp, Artificial Sequence
  Synthetic
ccgttttttttttttcgccaata

SEQ ID NO: 9718 - DNA, 23 bp, Artificial Sequence
  Synthetic
ccgttttttttttttacaagtgc

SEQ ID NO: 9719 - DNA, 23 bp, Artificial Sequence
  Synthetic
ccgttttttttttttactacctg

SEQ ID NO: 9720 - DNA, 23 bp, Artificial Sequence
  Synthetic
ccgttttttttttttactcaccg

SEQ ID NO: 9721 - DNA, 23 bp, Artificial Sequence
  Synthetic
ccgttttttttttttggtacaat

SEQ ID NO: 9722 - DNA, 23 bp, Artificial Sequence
  Synthetic
ccgttttttttttttcccaccga

SEQ ID NO: 9723 - DNA, 23 bp, Artificial Sequence
  Synthetic
ccgttttttttttttactcaccg

SEQ ID NO: 9724 - DNA, 23 bp, Artificial Sequence
  Synthetic
ccgttttttttttttaacccacc

SEQ ID NO: 9725 - DNA, 23 bp, Artificial Sequence
  Synthetic
ccgttttttttttttgtgagttc

SEQ ID NO: 9726 - DNA, 23 bp, Artificial Sequence
  Synthetic
ccgttttttttttttagttggca

SEQ ID NO: 9727 - DNA, 23 bp, Artificial Sequence
  Synthetic
ccgttttttttttttcagtgaat

SEQ ID NO: 9728 - DNA, 23 bp, Artificial Sequence
  Synthetic
ccgttttttttttttacccttat

SEQ ID NO: 9729 - DNA, 23 bp, Artificial Sequence
  Synthetic
ccgttttttttttttgaactgcc

SEQ ID NO: 9730 - DNA, 23 bp, Artificial Sequence
  Synthetic
ccgttttttttttttaagcccaa

SEQ ID NO: 9731 - DNA, 23 bp, Artificial Sequence
  Synthetic
ccgttttttttttttcggctgca

SEQ ID NO: 9732 - DNA, 23 bp, Artificial Sequence
  Synthetic
ccgttttttttttttaccctcca

SEQ ID NO: 9733 - DNA, 23 bp, Artificial Sequence
  Synthetic
ccgttttttttttttactgatat

SEQ ID NO: 9734 - DNA, 23 bp, Artificial Sequence
  Synthetic
ccgttttttttttttatctgcac

SEQ ID NO: 9735 - DNA, 23 bp, Artificial Sequence
  Synthetic
ccgttttttttttttagaaggag

SEQ ID NO: 9736 - DNA, 23 bp, Artificial Sequence
  Synthetic
ccgttttttttttttaactgcac

SEQ ID NO: 9737 - DNA, 23 bp, Artificial Sequence
  Synthetic
ccgttttttttttttacctaata

SEQ ID NO: 9738 - DNA, 23 bp, Artificial Sequence
  Synthetic
ccgttttttttttttagctgctt

SEQ ID NO: 9739 - DNA, 23 bp, Artificial Sequence
  Synthetic
ccgttttttttttttggggacga

SEQ ID NO: 9740 - DNA, 23 bp, Artificial Sequence
  Synthetic
ccgttttttttttttggctgtca

SEQ ID NO: 9741 - DNA, 23 bp, Artificial Sequence
  Synthetic
ccgttttttttttttctgggact

SEQ ID NO: 9742 - DNA, 23 bp, Artificial Sequence
  Synthetic
ccgttttttttttttaaagcggg

SEQ ID NO: 9743 - DNA, 23 bp, Artificial Sequence
  Synthetic
ccgttttttttttttccacatgg

SEQ ID NO: 9744 - DNA, 23 bp, Artificial Sequence
  Synthetic
ccgttttttttttttgccaatat

SEQ ID NO: 9745 - DNA, 23 bp, Artificial Sequence
  Synthetic
ccgttttttttttttccaacaac

SEQ ID NO: 9746 - DNA, 23 bp, Artificial Sequence
  Synthetic
ccgttttttttttttccaacaac

SEQ ID NO: 9747 - DNA, 23 bp, Artificial Sequence
  Synthetic
ccgttttttttttttgctgggtg

SEQ ID NO: 9748 - DNA, 23 bp, Artificial Sequence
  Synthetic
ccgttttttttttttcctatctc

SEQ ID NO: 9749 - DNA, 23 bp, Artificial Sequence
  Synthetic
ccgttttttttttttgaacaggt

SEQ ID NO: 9750 - DNA, 23 bp, Artificial Sequence
  Synthetic
ccgttttttttttttaaccaatg

SEQ ID NO: 9751 - DNA, 23 bp, Artificial Sequence
  Synthetic
ccgttttttttttttgaacagat

SEQ ID NO: 9752 - DNA, 23 bp, Artificial Sequence
  Synthetic
ccgttttttttttttcagttttg

SEQ ID NO: 9753 - DNA, 23 bp, Artificial Sequence
  Synthetic
ccgttttttttttttcagttttg

SEQ ID NO: 9754 - DNA, 23 bp, Artificial Sequence
  Synthetic
ccgttttttttttttacatcgtt

SEQ ID NO: 9755 - DNA, 23 bp, Artificial Sequence
  Synthetic
ccgttttttttttttccagcact

SEQ ID NO: 9756 - DNA, 23 bp, Artificial Sequence
  Synthetic
ccgttttttttttttgtcatcat

SEQ ID NO: 9757 - DNA, 23 bp, Artificial Sequence
  Synthetic
ccgttttttttttttccatcatt

SEQ ID NO: 9758 - DNA, 23 bp, Artificial Sequence
  Synthetic
ccgttttttttttttcccatgcc

SEQ ID NO: 9759 - DNA, 23 bp, Artificial Sequence
  Synthetic
ccgttttttttttttaaagaagt

SEQ ID NO: 9760 - DNA, 23 bp, Artificial Sequence
  Synthetic
ccgttttttttttttctagtggt

SEQ ID NO: 9761 - DNA, 23 bp, Artificial Sequence
  Synthetic
ccgttttttttttttaggcatag

SEQ ID NO: 9762 - DNA, 23 bp, Artificial Sequence
  Synthetic
ccgttttttttttttcagactcc

SEQ ID NO: 9763 - DNA, 23 bp, Artificial Sequence
  Synthetic
ccgttttttttttttccacacac

SEQ ID NO: 9764 - DNA, 23 bp, Artificial Sequence
  Synthetic
ccgttttttttttttacaagctt

SEQ ID NO: 9765 - DNA, 23 bp, Artificial Sequence
  Synthetic
ccgttttttttttttctacctgc

SEQ ID NO: 9766 - DNA, 23 bp, Artificial Sequence
  Synthetic
ccgttttttttttttctacctgc

SEQ ID NO: 9767 - DNA, 23 bp, Artificial Sequence
  Synthetic
ccgttttttttttttcaacatca

SEQ ID NO: 9768 - DNA, 23 bp, Artificial Sequence
  Synthetic
ccgttttttttttttcagccgct

SEQ ID NO: 9769 - DNA, 23 bp, Artificial Sequence
  Synthetic
ccgttttttttttttaggcgaag

SEQ ID NO: 9770 - DNA, 23 bp, Artificial Sequence
  Synthetic
ccgttttttttttttggccgtga

SEQ ID NO: 9771 - DNA, 23 bp, Artificial Sequence
  Synthetic
ccgttttttttttttctgcctgt

SEQ ID NO: 9772 - DNA, 23 bp, Artificial Sequence
  Synthetic
ccgttttttttttttgtctgtca

SEQ ID NO: 9773 - DNA, 23 bp, Artificial Sequence
  Synthetic
ccgttttttttttttcacagttg

SEQ ID NO: 9774 - DNA, 23 bp, Artificial Sequence
  Synthetic
ccgttttttttttttatccaatc

SEQ ID NO: 9775 - DNA, 23 bp, Artificial Sequence
  Synthetic
ccgttttttttttttacatggtt

SEQ ID NO: 9776 - DNA, 23 bp, Artificial Sequence
  Synthetic
ccgttttttttttttagaattgc

SEQ ID NO: 9777 - DNA, 23 bp, Artificial Sequence
  Synthetic
ccgttttttttttttacagttct

SEQ ID NO: 9778 - DNA, 23 bp, Artificial Sequence
  Synthetic
ccgttttttttttttaaagtgtc

SEQ ID NO: 9779 - DNA, 23 bp, Artificial Sequence
  Synthetic
ccgttttttttttttgaaaccca

SEQ ID NO: 9780 - DNA, 23 bp, Artificial Sequence
  Synthetic
ccgttttttttttttgagaccca

SEQ ID NO: 9781 - DNA, 23 bp, Artificial Sequence
  Synthetic
ccgttttttttttttggggtatt

SEQ ID NO: 9782 - DNA, 23 bp, Artificial Sequence
  Synthetic
ccgttttttttttttaaacggaa

SEQ ID NO: 9783 - DNA, 23 bp, Artificial Sequence
  Synthetic
ccgttttttttttttggaaatcc

SEQ ID NO: 9784 - DNA, 23 bp, Artificial Sequence
  Synthetic
ccgttttttttttttggtaatcc

SEQ ID NO: 9785 - DNA, 23 bp, Artificial Sequence
  Synthetic
ccgttttttttttttctgttcct

SEQ ID NO: 9786 - DNA, 23 bp, Artificial Sequence
  Synthetic
ccgttttttttttttcagaccga

SEQ ID NO: 9787 - DNA, 23 bp, Artificial Sequence
  Synthetic
ccgttttttttttttgcctatcc

SEQ ID NO: 9788 - DNA, 23 bp, Artificial Sequence
  Synthetic
ccgttttttttttttaacctatc

SEQ ID NO: 9789 - DNA, 23 bp, Artificial Sequence
  Synthetic
ccgttttttttttttgcggaact

SEQ ID NO: 9790 - DNA, 23 bp, Artificial Sequence
  Synthetic
ccgttttttttttttgcagaact

SEQ ID NO: 9791 - DNA, 23 bp, Artificial Sequence
  Synthetic
ccgttttttttttttctcaatag

SEQ ID NO: 9792 - DNA, 23 bp, Artificial Sequence
  Synthetic
ccgttttttttttttacaggatt

SEQ ID NO: 9793 - DNA, 23 bp, Artificial Sequence
  Synthetic
ccgttttttttttttaagcggtt

SEQ ID NO: 9794 - DNA, 23 bp, Artificial Sequence
  Synthetic
ccgttttttttttttatgtatgt

SEQ ID NO: 9795 - DNA, 23 bp, Artificial Sequence
  Synthetic
ccgttttttttttttaaccgatt

SEQ ID NO: 9796 - DNA, 23 bp, Artificial Sequence
  Synthetic
ccgttttttttttttaacactga

SEQ ID NO: 9797 - DNA, 23 bp, Artificial Sequence
  Synthetic
ccgttttttttttttaccgattt

SEQ ID NO: 9798 - DNA, 23 bp, Artificial Sequence
  Synthetic
ccgttttttttttttgctttgac

SEQ ID NO: 9799 - DNA, 23 bp, Artificial Sequence
  Synthetic
ccgttttttttttttcaccaaaa

SEQ ID NO: 9800 - DNA, 23 bp, Artificial Sequence
  Synthetic
ccgttttttttttttaaagcaag

SEQ ID NO: 9801 - DNA, 23 bp, Artificial Sequence
  Synthetic
ccgttttttttttttctactaaa

SEQ ID NO: 9802 - DNA, 23 bp, Artificial Sequence
  Synthetic
ccgttttttttttttagaaagca

SEQ ID NO: 9803 - DNA, 23 bp, Artificial Sequence
  Synthetic
ccgttttttttttttccactgaa

SEQ ID NO: 9804 - DNA, 23 bp, Artificial Sequence
  Synthetic
ccgttttttttttttcagcaggt

SEQ ID NO: 9805 - DNA, 23 bp, Artificial Sequence
  Synthetic
ccgttttttttttttacactcaa

SEQ ID NO: 9806 - DNA, 23 bp, Artificial Sequence
  Synthetic
ccgttttttttttttgctgcaaa

SEQ ID NO: 9807 - DNA, 23 bp, Artificial Sequence
  Synthetic
ccgttttttttttttcttccagt

SEQ ID NO: 9808 - DNA, 23 bp, Artificial Sequence
  Synthetic
ccgttttttttttttagctgagt

SEQ ID NO: 9809 - DNA, 23 bp, Artificial Sequence
  Synthetic
ccgttttttttttttgctgagag

SEQ ID NO: 9810 - DNA, 23 bp, Artificial Sequence
  Synthetic
ccgttttttttttttcttccagt

SEQ ID NO: 9811 - DNA, 23 bp, Artificial Sequence
  Synthetic
ccgttttttttttttgctgtaaa

SEQ ID NO: 9812 - DNA, 23 bp, Artificial Sequence
  Synthetic
ccgttttttttttttccagtcaa

SEQ ID NO: 9813 - DNA, 23 bp, Artificial Sequence
  Synthetic
ccgttttttttttttcagctatg

SEQ ID NO: 9814 - DNA, 23 bp, Artificial Sequence
  Synthetic
ccgttttttttttttgcaactta

SEQ ID NO: 9815 - DNA, 23 bp, Artificial Sequence
  Synthetic
ccgttttttttttttcgccctct

SEQ ID NO: 9816 - DNA, 23 bp, Artificial Sequence
  Synthetic
ccgttttttttttttagaggtcg

SEQ ID NO: 9817 - DNA, 23 bp, Artificial Sequence
  Synthetic
ccgttttttttttttccagcagc

SEQ ID NO: 9818 - DNA, 23 bp, Artificial Sequence
  Synthetic
ccgttttttttttttacaccaat

SEQ ID NO: 9819 - DNA, 23 bp, Artificial Sequence
  Synthetic
ccgttttttttttttacacttac

SEQ ID NO: 9820 - DNA, 23 bp, Artificial Sequence
  Synthetic
ccgttttttttttttctggagga

SEQ ID NO: 9821 - DNA, 23 bp, Artificial Sequence
  Synthetic
ccgttttttttttttacggaagg

SEQ ID NO: 9822 - DNA, 23 bp, Artificial Sequence
  Synthetic
ccgttttttttttttaaagaggt

SEQ ID NO: 9823 - DNA, 23 bp, Artificial Sequence
  Synthetic
ccgttttttttttttcaatgcaa

SEQ ID NO: 9824 - DNA, 23 bp, Artificial Sequence
  Synthetic
ccgttttttttttttctctgcag

SEQ ID NO: 9825 - DNA, 23 bp, Artificial Sequence
  Synthetic
ccgttttttttttttctaggata

SEQ ID NO: 9826 - DNA, 23 bp, Artificial Sequence
  Synthetic
ccgttttttttttttacattttt

SEQ ID NO: 9827 - DNA, 23 bp, Artificial Sequence
  Synthetic
ccgttttttttttttaaaggcat

SEQ ID NO: 9828 - DNA, 23 bp, Artificial Sequence
  Synthetic
ccgttttttttttttcaacaaaa

SEQ ID NO: 9829 - DNA, 23 bp, Artificial Sequence
  Synthetic
ccgttttttttttttgagctcct

SEQ ID NO: 9830 - DNA, 23 bp, Artificial Sequence
  Synthetic
ccgttttttttttttgcaatgca

SEQ ID NO: 9831 - DNA, 23 bp, Artificial Sequence
  Synthetic
ccgttttttttttttggctataa

SEQ ID NO: 9832 - DNA, 23 bp, Artificial Sequence
  Synthetic
ccgttttttttttttgacgggtg

SEQ ID NO: 9833 - DNA, 23 bp, Artificial Sequence
  Synthetic
ccgttttttttttttgccctgga

SEQ ID NO: 9834 - DNA, 23 bp, Artificial Sequence
  Synthetic
ccgttttttttttttagaggcag

SEQ ID NO: 9835 - DNA, 23 bp, Artificial Sequence
  Synthetic
ccgttttttttttttaacaacca

SEQ ID NO: 9836 - DNA, 23 bp, Artificial Sequence
  Synthetic
ccgttttttttttttcaatcagc

SEQ ID NO: 9837 - DNA, 23 bp, Artificial Sequence
  Synthetic
ccgttttttttttttgcaatcag

SEQ ID NO: 9838 - DNA, 23 bp, Artificial Sequence
  Synthetic
ccgttttttttttttgtacccct

SEQ ID NO: 9839 - DNA, 23 bp, Artificial Sequence
  Synthetic
ccgttttttttttttactcacac

SEQ ID NO: 9840 - DNA, 23 bp, Artificial Sequence
  Synthetic
ccgttttttttttttacagatgg

SEQ ID NO: 9841 - DNA, 23 bp, Artificial Sequence
  Synthetic
ccgttttttttttttaaattgca

SEQ ID NO: 9842 - DNA, 23 bp, Artificial Sequence
  Synthetic
ccgttttttttttttataaggat

SEQ ID NO: 9843 - DNA, 23 bp, Artificial Sequence
  Synthetic
ccgttttttttttttcaccattg

SEQ ID NO: 9844 - DNA, 23 bp, Artificial Sequence
  Synthetic
ccgttttttttttttaaacgtgg

SEQ ID NO: 9845 - DNA, 23 bp, Artificial Sequence
  Synthetic
ccgttttttttttttaaagatca

SEQ ID NO: 9846 - DNA, 23 bp, Artificial Sequence
  Synthetic
ccgttttttttttttgcgaatat

SEQ ID NO: 9847 - DNA, 23 bp, Artificial Sequence
  Synthetic
ccgttttttttttttccaggttc

SEQ ID NO: 9848 - DNA, 23 bp, Artificial Sequence
  Synthetic
ccgttttttttttttacactcaa

SEQ ID NO: 9849 - DNA, 23 bp, Artificial Sequence
  Synthetic
ccgttttttttttttacgctcaa

SEQ ID NO: 9850 - DNA, 23 bp, Artificial Sequence
  Synthetic
ccgttttttttttttacacccca

SEQ ID NO: 9851 - DNA, 23 bp, Artificial Sequence
  Synthetic
ccgttttttttttttggaaagcg

SEQ ID NO: 9852 - DNA, 23 bp, Artificial Sequence
  Synthetic
ccgttttttttttttcacttatc

SEQ ID NO: 9853 - DNA, 23 bp, Artificial Sequence
  Synthetic
ccgttttttttttttcacgcgag

SEQ ID NO: 9854 - DNA, 23 bp, Artificial Sequence
  Synthetic
ccgttttttttttttacgtggat

SEQ ID NO: 9855 - DNA, 23 bp, Artificial Sequence
  Synthetic
ccgttttttttttttctcataga

SEQ ID NO: 9856 - DNA, 23 bp, Artificial Sequence
  Synthetic
ccgttttttttttttaacatgga

SEQ ID NO: 9857 - DNA, 23 bp, Artificial Sequence
  Synthetic
ccgttttttttttttacaaaagt

SEQ ID NO: 9858 - DNA, 23 bp, Artificial Sequence
  Synthetic
ccgttttttttttttacacagga

SEQ ID NO: 9859 - DNA, 23 bp, Artificial Sequence
  Synthetic
ccgttttttttttttacgttcca

SEQ ID NO: 9860 - DNA, 23 bp, Artificial Sequence
  Synthetic
ccgttttttttttttaagatgtg

SEQ ID NO: 9861 - DNA, 23 bp, Artificial Sequence
  Synthetic
ccgttttttttttttgcgcatgt

SEQ ID NO: 9862 - DNA, 23 bp, Artificial Sequence
  Synthetic
ccgttttttttttttacagagag

SEQ ID NO: 9863 - DNA, 23 bp, Artificial Sequence
  Synthetic
ccgttttttttttttcgaatcca

SEQ ID NO: 9864 - DNA, 23 bp, Artificial Sequence
  Synthetic
ccgttttttttttttagccacaa

SEQ ID NO: 9865 - DNA, 23 bp, Artificial Sequence
  Synthetic
ccgttttttttttttatgaacaa

SEQ ID NO: 9866 - DNA, 23 bp, Artificial Sequence
  Synthetic
ccgttttttttttttaggggttc

SEQ ID NO: 9867 - DNA, 23 bp, Artificial Sequence
  Synthetic
ccgttttttttttttgcaaagtt

SEQ ID NO: 9868 - DNA, 23 bp, Artificial Sequence
  Synthetic
ccgttttttttttttacaggcca

SEQ ID NO: 9869 - DNA, 23 bp, Artificial Sequence
  Synthetic
ccgttttttttttttcgtacgct

SEQ ID NO: 9870 - DNA, 23 bp, Artificial Sequence
  Synthetic
ccgttttttttttttacggctag

SEQ ID NO: 9871 - DNA, 23 bp, Artificial Sequence
  Synthetic
ccgttttttttttttgcgcccaa

SEQ ID NO: 9872 - DNA, 23 bp, Artificial Sequence
  Synthetic
ccgttttttttttttggccttct

SEQ ID NO: 9873 - DNA, 23 bp, Artificial Sequence
  Synthetic
ccgttttttttttttggccttct

SEQ ID NO: 9874 - DNA, 23 bp, Artificial Sequence
  Synthetic
ccgttttttttttttctgagggg

SEQ ID NO: 9875 - DNA, 23 bp, Artificial Sequence
  Synthetic
ccgttttttttttttcaaaacat

SEQ ID NO: 9876 - DNA, 23 bp, Artificial Sequence
  Synthetic
ccgttttttttttttggcggaca

SEQ ID NO: 9877 - DNA, 23 bp, Artificial Sequence
  Synthetic
ccgttttttttttttcaacggga

SEQ ID NO: 9878 - DNA, 23 bp, Artificial Sequence
  Synthetic
ccgttttttttttttacggtttt

SEQ ID NO: 9879 - DNA, 23 bp, Artificial Sequence
  Synthetic
ccgttttttttttttgcatgacg

SEQ ID NO: 9880 - DNA, 23 bp, Artificial Sequence
  Synthetic
ccgttttttttttttccacccaa

SEQ ID NO: 9881 - DNA, 23 bp, Artificial Sequence
  Synthetic
ccgttttttttttttagacatgg

SEQ ID NO: 9882 - DNA, 23 bp, Artificial Sequence
  Synthetic
ccgttttttttttttacaccgag

SEQ ID NO: 9883 - DNA, 23 bp, Artificial Sequence
  Synthetic
ccgttttttttttttatgggaca

SEQ ID NO: 9884 - DNA, 23 bp, Artificial Sequence
  Synthetic
ccgttttttttttttaccagcta

SEQ ID NO: 9885 - DNA, 23 bp, Artificial Sequence
  Synthetic
ccgttttttttttttgccagcta

SEQ ID NO: 9886 - DNA, 23 bp, Artificial Sequence
  Synthetic
ccgttttttttttttattaggaa

SEQ ID NO: 9887 - DNA, 23 bp, Artificial Sequence
  Synthetic
ccgttttttttttttaaactcag

SEQ ID NO: 9888 - DNA, 23 bp, Artificial Sequence
  Synthetic
ccgttttttttttttgtctcagt

SEQ ID NO: 9889 - DNA, 23 bp, Artificial Sequence
  Synthetic
ccgttttttttttttcttctttg

SEQ ID NO: 9890 - DNA, 23 bp, Artificial Sequence
  Synthetic
ccgttttttttttttcgaactca

SEQ ID NO: 9891 - DNA, 23 bp, Artificial Sequence
  Synthetic
ccgttttttttttttaaacccta

SEQ ID NO: 9892 - DNA, 23 bp, Artificial Sequence
  Synthetic
ccgttttttttttttgcagagac

SEQ ID NO: 9893 - DNA, 23 bp, Artificial Sequence
  Synthetic
ccgttttttttttttcgatgtag

SEQ ID NO: 9894 - DNA, 23 bp, Artificial Sequence
  Synthetic
ccgttttttttttttagaagacg

SEQ ID NO: 9895 - DNA, 23 bp, Artificial Sequence
  Synthetic
ccgttttttttttttatcgggag

SEQ ID NO: 9896 - DNA, 23 bp, Artificial Sequence
  Synthetic
ccgttttttttttttagagagga

SEQ ID NO: 9897 - DNA, 23 bp, Artificial Sequence
  Synthetic
ccgttttttttttttgaattcat

SEQ ID NO: 9898 - DNA, 23 bp, Artificial Sequence
  Synthetic
ccgttttttttttttctcggggc

SEQ ID NO: 9899 - DNA, 23 bp, Artificial Sequence
  Synthetic
ccgttttttttttttaactggat

SEQ ID NO: 9900 - DNA, 23 bp, Artificial Sequence
  Synthetic
ccgttttttttttttaagtggat

SEQ ID NO: 9901 - DNA, 23 bp, Artificial Sequence
  Synthetic
ccgttttttttttttgagagtgc

SEQ ID NO: 9902 - DNA, 23 bp, Artificial Sequence
  Synthetic
ccgttttttttttttgctgccgt

SEQ ID NO: 9903 - DNA, 23 bp, Artificial Sequence
  Synthetic
ccgttttttttttttcagcatgg

SEQ ID NO: 9904 - DNA, 23 bp, Artificial Sequence
  Synthetic
ccgttttttttttttcctcatgg

SEQ ID NO: 9905 - DNA, 23 bp, Artificial Sequence
  Synthetic
ccgttttttttttttaagaatct

SEQ ID NO: 9906 - DNA, 23 bp, Artificial Sequence
  Synthetic
ccgttttttttttttctggcaca

SEQ ID NO: 9907 - DNA, 23 bp, Artificial Sequence
  Synthetic
ccgttttttttttttaatgaaag

SEQ ID NO: 9908 - DNA, 23 bp, Artificial Sequence
  Synthetic
ccgttttttttttttaagaggtt

SEQ ID NO: 9909 - DNA, 23 bp, Artificial Sequence
  Synthetic
ccgttttttttttttaaagaagt

SEQ ID NO: 9910 - DNA, 23 bp, Artificial Sequence
  Synthetic
ccgttttttttttttgagattgg

SEQ ID NO: 9911 - DNA, 23 bp, Artificial Sequence
  Synthetic
ccgttttttttttttacaaacca

SEQ ID NO: 9912 - DNA, 23 bp, Artificial Sequence
  Synthetic
ccgttttttttttttgaaaaacg

SEQ ID NO: 9913 - DNA, 23 bp, Artificial Sequence
  Synthetic
ccgttttttttttttaaacatca

SEQ ID NO: 9914 - DNA, 23 bp, Artificial Sequence
  Synthetic
ccgttttttttttttcagaatcc

SEQ ID NO: 9915 - DNA, 23 bp, Artificial Sequence
  Synthetic
ccgttttttttttttctcaccca

SEQ ID NO: 9916 - DNA, 23 bp, Artificial Sequence
  Synthetic
ccgttttttttttttagcaccca

SEQ ID NO: 9917 - DNA, 23 bp, Artificial Sequence
  Synthetic
ccgttttttttttttctgcagaa

SEQ ID NO: 9918 - DNA, 23 bp, Artificial Sequence
  Synthetic
ccgttttttttttttatagagtg

SEQ ID NO: 9919 - DNA, 23 bp, Artificial Sequence
  Synthetic
ccgttttttttttttgaggaaac

SEQ ID NO: 9920 - DNA, 23 bp, Artificial Sequence
  Synthetic
ccgttttttttttttctactcag

SEQ ID NO: 9921 - DNA, 23 bp, Artificial Sequence
  Synthetic
ccgttttttttttttcactccaa

SEQ ID NO: 9922 - DNA, 23 bp, Artificial Sequence
  Synthetic
ccgttttttttttttctactcca

SEQ ID NO: 9923 - DNA, 23 bp, Artificial Sequence
  Synthetic
ccgttttttttttttctacccac

SEQ ID NO: 9924 - DNA, 23 bp, Artificial Sequence
  Synthetic
ccgttttttttttttgtgattgc

SEQ ID NO: 9925 - DNA, 23 bp, Artificial Sequence
  Synthetic
ccgttttttttttttgactgcag

SEQ ID NO: 9926 - DNA, 23 bp, Artificial Sequence
  Synthetic
ccgttttttttttttgacctcag

SEQ ID NO: 9927 - DNA, 23 bp, Artificial Sequence
  Synthetic
ccgttttttttttttgaaagtgc

SEQ ID NO: 9928 - DNA, 23 bp, Artificial Sequence
  Synthetic
ccgttttttttttttataaatga

SEQ ID NO: 9929 - DNA, 23 bp, Artificial Sequence
  Synthetic
ccgttttttttttttctactcac

SEQ ID NO: 9930 - DNA, 23 bp, Artificial Sequence
  Synthetic
ccgttttttttttttacgctcca

SEQ ID NO: 9931 - DNA, 23 bp, Artificial Sequence
  Synthetic
ccgttttttttttttcagaaagt

SEQ ID NO: 9932 - DNA, 23 bp, Artificial Sequence
  Synthetic
ccgttttttttttttaccctctg

SEQ ID NO: 9933 - DNA, 23 bp, Artificial Sequence
  Synthetic
ccgttttttttttttaaagtgct

SEQ ID NO: 9934 - DNA, 23 bp, Artificial Sequence
  Synthetic
ccgttttttttttttagacagtg

SEQ ID NO: 9935 - DNA, 23 bp, Artificial Sequence
  Synthetic
ccgttttttttttttaacactct

SEQ ID NO: 9936 - DNA, 23 bp, Artificial Sequence
  Synthetic
ccgttttttttttttaacactct

SEQ ID NO: 9937 - DNA, 23 bp, Artificial Sequence
  Synthetic
ccgttttttttttttacactcta

SEQ ID NO: 9938 - DNA, 23 bp, Artificial Sequence
  Synthetic
ccgttttttttttttccagcaaa

SEQ ID NO: 9939 - DNA, 23 bp, Artificial Sequence
  Synthetic
ccgttttttttttttacctctaa

SEQ ID NO: 9940 - DNA, 23 bp, Artificial Sequence
  Synthetic
ccgttttttttttttcactctaa

SEQ ID NO: 9941 - DNA, 23 bp, Artificial Sequence
  Synthetic
ccgttttttttttttcagaaagt

SEQ ID NO: 9942 - DNA, 23 bp, Artificial Sequence
  Synthetic
ccgttttttttttttgctccaaa

SEQ ID NO: 9943 - DNA, 23 bp, Artificial Sequence
  Synthetic
ccgttttttttttttacactctg

SEQ ID NO: 9944 - DNA, 23 bp, Artificial Sequence
  Synthetic
ccgttttttttttttcctctaaa

SEQ ID NO: 9945 - DNA, 23 bp, Artificial Sequence
  Synthetic
ccgttttttttttttagagaaag

SEQ ID NO: 9946 - DNA, 23 bp, Artificial Sequence
  Synthetic
ccgttttttttttttgtaacact

SEQ ID NO: 9947 - DNA, 23 bp, Artificial Sequence
  Synthetic
ccgttttttttttttaaacctct

SEQ ID NO: 9948 - DNA, 23 bp, Artificial Sequence
  Synthetic
ccgttttttttttttatcctcta

SEQ ID NO: 9949 - DNA, 23 bp, Artificial Sequence
  Synthetic
ccgttttttttttttacactcta

SEQ ID NO: 9950 - DNA, 23 bp, Artificial Sequence
  Synthetic
ccgttttttttttttacactcta

SEQ ID NO: 9951 - DNA, 23 bp, Artificial Sequence
  Synthetic
ccgttttttttttttgaaagtgc

SEQ ID NO: 9952 - DNA, 23 bp, Artificial Sequence
  Synthetic
ccgttttttttttttacagtcca

SEQ ID NO: 9953 - DNA, 23 bp, Artificial Sequence
  Synthetic
ccgttttttttttttagaaagta

SEQ ID NO: 9954 - DNA, 23 bp, Artificial Sequence
  Synthetic
ccgttttttttttttccctctaa

SEQ ID NO: 9955 - DNA, 23 bp, Artificial Sequence
  Synthetic
ccgttttttttttttaaccctct

SEQ ID NO: 9956 - DNA, 23 bp, Artificial Sequence
  Synthetic
ccgttttttttttttaacccacc

SEQ ID NO: 9957 - DNA, 23 bp, Artificial Sequence
  Synthetic
ccgttttttttttttcagaaagg

SEQ ID NO: 9958 - DNA, 23 bp, Artificial Sequence
  Synthetic
ccgttttttttttttccctcaaa

SEQ ID NO: 9959 - DNA, 23 bp, Artificial Sequence
  Synthetic
ccgttttttttttttaaccctct

SEQ ID NO: 9960 - DNA, 23 bp, Artificial Sequence
  Synthetic
ccgttttttttttttacactcta

SEQ ID NO: 9961 - DNA, 23 bp, Artificial Sequence
  Synthetic
ccgttttttttttttactctaaa

SEQ ID NO: 9962 - DNA, 23 bp, Artificial Sequence
  Synthetic
ccgttttttttttttacactcta

SEQ ID NO: 9963 - DNA, 23 bp, Artificial Sequence
  Synthetic
ccgttttttttttttaacactct

SEQ ID NO: 9964 - DNA, 23 bp, Artificial Sequence
  Synthetic
ccgttttttttttttccctctat

SEQ ID NO: 9965 - DNA, 23 bp, Artificial Sequence
  Synthetic
ccgttttttttttttactccaaa

SEQ ID NO: 9966 - DNA, 23 bp, Artificial Sequence
  Synthetic
ccgttttttttttttgagaaagt

SEQ ID NO: 9967 - DNA, 23 bp, Artificial Sequence
  Synthetic
ccgttttttttttttagaaagtg

SEQ ID NO: 9968 - DNA, 23 bp, Artificial Sequence
  Synthetic
ccgttttttttttttgctctaaa

SEQ ID NO: 9969 - DNA, 23 bp, Artificial Sequence
  Synthetic
ccgttttttttttttagaaagtg

SEQ ID NO: 9970 - DNA, 23 bp, Artificial Sequence
  Synthetic
ccgttttttttttttaacagaaa

SEQ ID NO: 9971 - DNA, 23 bp, Artificial Sequence
  Synthetic
ccgttttttttttttgcctctaa

SEQ ID NO: 9972 - DNA, 23 bp, Artificial Sequence
  Synthetic
ccgttttttttttttaacagaaa

SEQ ID NO: 9973 - DNA, 23 bp, Artificial Sequence
  Synthetic
ccgttttttttttttagaaaggg

SEQ ID NO: 9974 - DNA, 23 bp, Artificial Sequence
  Synthetic
ccgttttttttttttacggtcct

SEQ ID NO: 9975 - DNA, 23 bp, Artificial Sequence
  Synthetic
ccgttttttttttttacacacca

SEQ ID NO: 9976 - DNA, 23 bp, Artificial Sequence
  Synthetic
ccgttttttttttttcagttatc

SEQ ID NO: 9977 - DNA, 23 bp, Artificial Sequence
  Synthetic
ccgttttttttttttctcgtgac

SEQ ID NO: 9978 - DNA, 23 bp, Artificial Sequence
  Synthetic
ccgttttttttttttacttgcta

SEQ ID NO: 9979 - DNA, 23 bp, Artificial Sequence
  Synthetic
ccgttttttttttttcacacaat

SEQ ID NO: 9980 - DNA, 23 bp, Artificial Sequence
  Synthetic
ccgttttttttttttgcaaaagt

SEQ ID NO: 9981 - DNA, 23 bp, Artificial Sequence
  Synthetic
ccgttttttttttttacaaaagc

SEQ ID NO: 9982 - DNA, 23 bp, Artificial Sequence
  Synthetic
ccgttttttttttttgcaaaagt

SEQ ID NO: 9983 - DNA, 23 bp, Artificial Sequence
  Synthetic
ccgttttttttttttgcaaaaga

SEQ ID NO: 9984 - DNA, 23 bp, Artificial Sequence
  Synthetic
ccgttttttttttttagagctca

SEQ ID NO: 9985 - DNA, 23 bp, Artificial Sequence
  Synthetic
ccgttttttttttttatgtgcct

SEQ ID NO: 9986 - DNA, 23 bp, Artificial Sequence
  Synthetic
ccgttttttttttttggaaacca

SEQ ID NO: 9987 - DNA, 23 bp, Artificial Sequence
  Synthetic
ccgttttttttttttctgaaacc

SEQ ID NO: 9988 - DNA, 23 bp, Artificial Sequence
  Synthetic
ccgttttttttttttgtctaacc

SEQ ID NO: 9989 - DNA, 23 bp, Artificial Sequence
  Synthetic
ccgttttttttttttaaaacaaa

SEQ ID NO: 9990 - DNA, 23 bp, Artificial Sequence
  Synthetic
ccgttttttttttttactggctg

SEQ ID NO: 9991 - DNA, 23 bp, Artificial Sequence
  Synthetic
ccgttttttttttttatcagagg

SEQ ID NO: 9992 - DNA, 23 bp, Artificial Sequence
  Synthetic
ccgttttttttttttcatattac

SEQ ID NO: 9993 - DNA, 23 bp, Artificial Sequence
  Synthetic
ccgttttttttttttagacaagg

SEQ ID NO: 9994 - DNA, 23 bp, Artificial Sequence
  Synthetic
ccgttttttttttttattttggt

SEQ ID NO: 9995 - DNA, 23 bp, Artificial Sequence
  Synthetic
ccgttttttttttttggtgcata

SEQ ID NO: 9996 - DNA, 23 bp, Artificial Sequence
  Synthetic
ccgttttttttttttggcggccg

SEQ ID NO: 9997 - DNA, 23 bp, Artificial Sequence
  Synthetic
ccgttttttttttttacttcaag

SEQ ID NO: 9998 - DNA, 23 bp, Artificial Sequence
  Synthetic
ccgttttttttttttgcaaatgg

SEQ ID NO: 9999 - DNA, 23 bp, Artificial Sequence
  Synthetic
ccgttttttttttttgggaaacg

SEQ ID NO: 10000 - DNA, 23 bp, Artificial Sequence
  Synthetic
ccgttttttttttttgcctgctg

SEQ ID NO: 10001 - DNA, 23 bp, Artificial Sequence
  Synthetic
ccgttttttttttttaaacagac

SEQ ID NO: 10002 - DNA, 23 bp, Artificial Sequence
  Synthetic
ccgttttttttttttgttgggat

SEQ ID NO: 10003 - DNA, 23 bp, Artificial Sequence
  Synthetic
ccgttttttttttttgttctgtc

SEQ ID NO: 10004 - DNA, 23 bp, Artificial Sequence
  Synthetic
ccgttttttttttttgtgtgtat

SEQ ID NO: 10005 - DNA, 23 bp, Artificial Sequence
  Synthetic
ccgttttttttttttactttcca

SEQ ID NO: 10006 - DNA, 23 bp, Artificial Sequence
  Synthetic
ccgttttttttttttgcaaaggt

SEQ ID NO: 10007 - DNA, 23 bp, Artificial Sequence
  Synthetic
ccgttttttttttttctcactca

SEQ ID NO: 10008 - DNA, 23 bp, Artificial Sequence
  Synthetic
ccgttttttttttttgggccacc

SEQ ID NO: 10009 - DNA, 23 bp, Artificial Sequence
  Synthetic
ccgttttttttttttctgatcag

SEQ ID NO: 10010 - DNA, 23 bp, Artificial Sequence
  Synthetic
ccgttttttttttttgtgggtgt

SEQ ID NO: 10011 - DNA, 23 bp, Artificial Sequence
  Synthetic
ccgttttttttttttgctcctgt

SEQ ID NO: 10012 - DNA, 23 bp, Artificial Sequence
  Synthetic
ccgttttttttttttcaaagacg

SEQ ID NO: 10013 - DNA, 23 bp, Artificial Sequence
  Synthetic
ccgttttttttttttcaggtacc

SEQ ID NO: 10014 - DNA, 23 bp, Artificial Sequence
  Synthetic
ccgttttttttttttacaatcct

SEQ ID NO: 10015 - DNA, 23 bp, Artificial Sequence
  Synthetic
ccgttttttttttttatcgcggt

SEQ ID NO: 10016 - DNA, 23 bp, Artificial Sequence
  Synthetic
ccgttttttttttttcctaatga

SEQ ID NO: 10017 - DNA, 23 bp, Artificial Sequence
  Synthetic
ccgttttttttttttactgatct

SEQ ID NO: 10018 - DNA, 23 bp, Artificial Sequence
  Synthetic
ccgttttttttttttagtaactg

SEQ ID NO: 10019 - DNA, 23 bp, Artificial Sequence
  Synthetic
ccgttttttttttttgtaatggg

SEQ ID NO: 10020 - DNA, 23 bp, Artificial Sequence
  Synthetic
ccgttttttttttttctcagtcc

SEQ ID NO: 10021 - DNA, 23 bp, Artificial Sequence
  Synthetic
ccgttttttttttttagcataca

SEQ ID NO: 10022 - DNA, 23 bp, Artificial Sequence
  Synthetic
ccgttttttttttttggacctaa

SEQ ID NO: 10023 - DNA, 23 bp, Artificial Sequence
  Synthetic
ccgttttttttttttgtgactca

SEQ ID NO: 10024 - DNA, 23 bp, Artificial Sequence
  Synthetic
ccgttttttttttttgttctaac

SEQ ID NO: 10025 - DNA, 23 bp, Artificial Sequence
  Synthetic
ccgttttttttttttctgggaac

SEQ ID NO: 10026 - DNA, 23 bp, Artificial Sequence
  Synthetic
ccgttttttttttttctgcactt

SEQ ID NO: 10027 - DNA, 23 bp, Artificial Sequence
  Synthetic
ccgttttttttttttacaatgag

SEQ ID NO: 10028 - DNA, 23 bp, Artificial Sequence
  Synthetic
ccgttttttttttttacatcatc

SEQ ID NO: 10029 - DNA, 23 bp, Artificial Sequence
  Synthetic
ccgttttttttttttgctgagca

SEQ ID NO: 10030 - DNA, 23 bp, Artificial Sequence
  Synthetic
ccgttttttttttttaaagtcac

SEQ ID NO: 10031 - DNA, 23 bp, Artificial Sequence
  Synthetic
ccgttttttttttttagacacac

SEQ ID NO: 10032 - DNA, 23 bp, Artificial Sequence
  Synthetic
ccgttttttttttttcccgagga

SEQ ID NO: 10033 - DNA, 23 bp, Artificial Sequence
  Synthetic
ccgttttttttttttacagtggt

SEQ ID NO: 10034 - DNA, 23 bp, Artificial Sequence
  Synthetic
ccgttttttttttttgacgatga

SEQ ID NO: 10035 - DNA, 23 bp, Artificial Sequence
  Synthetic
ccgttttttttttttgtttgata

SEQ ID NO: 10036 - DNA, 23 bp, Artificial Sequence
  Synthetic
ccgttttttttttttgagcaagg

SEQ ID NO: 10037 - DNA, 23 bp, Artificial Sequence
  Synthetic
ccgttttttttttttctcctcca

SEQ ID NO: 10038 - DNA, 23 bp, Artificial Sequence
  Synthetic
ccgttttttttttttgggccgca

SEQ ID NO: 10039 - DNA, 23 bp, Artificial Sequence
  Synthetic
ccgttttttttttttgcaaaagt

SEQ ID NO: 10040 - DNA, 23 bp, Artificial Sequence
  Synthetic
ccgttttttttttttgtcctgaa

SEQ ID NO: 10041 - DNA, 23 bp, Artificial Sequence
  Synthetic
ccgttttttttttttaggagaag

SEQ ID NO: 10042 - DNA, 23 bp, Artificial Sequence
  Synthetic
ccgttttttttttttatctttga

SEQ ID NO: 10043 - DNA, 23 bp, Artificial Sequence
  Synthetic
ccgttttttttttttgttataga

SEQ ID NO: 10044 - DNA, 23 bp, Artificial Sequence
  Synthetic
ccgttttttttttttacggagct

SEQ ID NO: 10045 - DNA, 23 bp, Artificial Sequence
  Synthetic
ccgttttttttttttagagatga

SEQ ID NO: 10046 - DNA, 23 bp, Artificial Sequence
  Synthetic
ccgttttttttttttcccagcac

SEQ ID NO: 10047 - DNA, 23 bp, Artificial Sequence
  Synthetic
ccgttttttttttttgtcagacc

SEQ ID NO: 10048 - DNA, 23 bp, Artificial Sequence
  Synthetic
ccgttttttttttttaaggagct

SEQ ID NO: 10049 - DNA, 23 bp, Artificial Sequence
  Synthetic
ccgttttttttttttggcaaaga

SEQ ID NO: 10050 - DNA, 23 bp, Artificial Sequence
  Synthetic
ccgttttttttttttccacctgg

SEQ ID NO: 10051 - DNA, 23 bp, Artificial Sequence
  Synthetic
ccgttttttttttttagagggag

SEQ ID NO: 10052 - DNA, 23 bp, Artificial Sequence
  Synthetic
ccgttttttttttttaagtcact

SEQ ID NO: 10053 - DNA, 23 bp, Artificial Sequence
  Synthetic
ccgttttttttttttgccacctt

SEQ ID NO: 10054 - DNA, 23 bp, Artificial Sequence
  Synthetic
ccgttttttttttttactcagaa

SEQ ID NO: 10055 - DNA, 23 bp, Artificial Sequence
  Synthetic
ccgttttttttttttactgggca

SEQ ID NO: 10056 - DNA, 23 bp, Artificial Sequence
  Synthetic
ccgttttttttttttatttctat

SEQ ID NO: 10057 - DNA, 23 bp, Artificial Sequence
  Synthetic
ccgttttttttttttaggtaagc

SEQ ID NO: 10058 - DNA, 23 bp, Artificial Sequence
  Synthetic
ccgttttttttttttgctccaac

SEQ ID NO: 10059 - DNA, 23 bp, Artificial Sequence
  Synthetic
ccgttttttttttttacccaaca

SEQ ID NO: 10060 - DNA, 23 bp, Artificial Sequence
  Synthetic
ccgttttttttttttgaacacaa

SEQ ID NO: 10061 - DNA, 23 bp, Artificial Sequence
  Synthetic
ccgttttttttttttaggactat

SEQ ID NO: 10062 - DNA, 23 bp, Artificial Sequence
  Synthetic
ccgttttttttttttaagacatt

SEQ ID NO: 10063 - DNA, 23 bp, Artificial Sequence
  Synthetic
ccgttttttttttttcctctttt

SEQ ID NO: 10064 - DNA, 23 bp, Artificial Sequence
  Synthetic
ccgttttttttttttcgactgcc

SEQ ID NO: 10065 - DNA, 23 bp, Artificial Sequence
  Synthetic
ccgttttttttttttgctgggct

SEQ ID NO: 10066 - DNA, 23 bp, Artificial Sequence
  Synthetic
ccgttttttttttttaccttccc

SEQ ID NO: 10067 - DNA, 23 bp, Artificial Sequence
  Synthetic
ccgttttttttttttgctgaggt

SEQ ID NO: 10068 - DNA, 23 bp, Artificial Sequence
  Synthetic
ccgttttttttttttcccacagg

SEQ ID NO: 10069 - DNA, 23 bp, Artificial Sequence
  Synthetic
ccgttttttttttttattgtggt

SEQ ID NO: 10070 - DNA, 23 bp, Artificial Sequence
  Synthetic
ccgttttttttttttgtccaaag

SEQ ID NO: 10071 - DNA, 23 bp, Artificial Sequence
  Synthetic
ccgttttttttttttggacattg

SEQ ID NO: 10072 - DNA, 23 bp, Artificial Sequence
  Synthetic
ccgttttttttttttctgcgggc

SEQ ID NO: 10073 - DNA, 23 bp, Artificial Sequence
  Synthetic
ccgttttttttttttacgcagag

SEQ ID NO: 10074 - DNA, 23 bp, Artificial Sequence
  Synthetic
ccgttttttttttttaggccgcc

SEQ ID NO: 10075 - DNA, 23 bp, Artificial Sequence
  Synthetic
ccgttttttttttttacagcgct

SEQ ID NO: 10076 - DNA, 23 bp, Artificial Sequence
  Synthetic
ccgttttttttttttagaggcag

SEQ ID NO: 10077 - DNA, 23 bp, Artificial Sequence
  Synthetic
ccgttttttttttttgaggtgac

SEQ ID NO: 10078 - DNA, 23 bp, Artificial Sequence
  Synthetic
ccgttttttttttttcaagacac

SEQ ID NO: 10079 - DNA, 23 bp, Artificial Sequence
  Synthetic
ccgttttttttttttctacctga

SEQ ID NO: 10080 - DNA, 23 bp, Artificial Sequence
  Synthetic
ccgttttttttttttgctctaag

SEQ ID NO: 10081 - DNA, 23 bp, Artificial Sequence
  Synthetic
ccgttttttttttttcagcagta

SEQ ID NO: 10082 - DNA, 23 bp, Artificial Sequence
  Synthetic
ccgttttttttttttgcctcaga

SEQ ID NO: 10083 - DNA, 23 bp, Artificial Sequence
  Synthetic
ccgttttttttttttgaaggaag

SEQ ID NO: 10084 - DNA, 23 bp, Artificial Sequence
  Synthetic
ccgttttttttttttaccagtgc

SEQ ID NO: 10085 - DNA, 23 bp, Artificial Sequence
  Synthetic
ccgttttttttttttgactcttg

SEQ ID NO: 10086 - DNA, 23 bp, Artificial Sequence
  Synthetic
ccgttttttttttttgtcctgag

SEQ ID NO: 10087 - DNA, 23 bp, Artificial Sequence
  Synthetic
ccgttttttttttttcaaaagtc

SEQ ID NO: 10088 - DNA, 23 bp, Artificial Sequence
  Synthetic
ccgttttttttttttgcacaacc

SEQ ID NO: 10089 - DNA, 23 bp, Artificial Sequence
  Synthetic
ccgttttttttttttgttcagta

SEQ ID NO: 10090 - DNA, 23 bp, Artificial Sequence
  Synthetic
ccgttttttttttttgcacatgt

SEQ ID NO: 10091 - DNA, 23 bp, Artificial Sequence
  Synthetic
ccgttttttttttttaaagaggt

SEQ ID NO: 10092 - DNA, 23 bp, Artificial Sequence
  Synthetic
ccgttttttttttttagaggttg

SEQ ID NO: 10093 - DNA, 23 bp, Artificial Sequence
  Synthetic
ccgttttttttttttcctagaga

SEQ ID NO: 10094 - DNA, 23 bp, Artificial Sequence
  Synthetic
ccgttttttttttttaccaacgg

SEQ ID NO: 10095 - DNA, 23 bp, Artificial Sequence
  Synthetic
ccgttttttttttttggggaccc

SEQ ID NO: 10096 - DNA, 23 bp, Artificial Sequence
  Synthetic
ccgttttttttttttcaactccg

SEQ ID NO: 10097 - DNA, 23 bp, Artificial Sequence
  Synthetic
ccgttttttttttttacgcgcag

SEQ ID NO: 10098 - DNA, 23 bp, Artificial Sequence
  Synthetic
ccgttttttttttttctgctggg

SEQ ID NO: 10099 - DNA, 23 bp, Artificial Sequence
  Synthetic
ccgttttttttttttgcggtccc

SEQ ID NO: 10100 - DNA, 23 bp, Artificial Sequence
  Synthetic
ccgttttttttttttgtagtggg

SEQ ID NO: 10101 - DNA, 23 bp, Artificial Sequence
  Synthetic
ccgttttttttttttacctccag

SEQ ID NO: 10102 - DNA, 23 bp, Artificial Sequence
  Synthetic
ccgttttttttttttcaacaaaa

SEQ ID NO: 10103 - DNA, 23 bp, Artificial Sequence
  Synthetic
ccgttttttttttttggttagtg

SEQ ID NO: 10104 - DNA, 23 bp, Artificial Sequence
  Synthetic
ccgttttttttttttcatcacct

SEQ ID NO: 10105 - DNA, 23 bp, Artificial Sequence
  Synthetic
ccgttttttttttttgctgaggc

SEQ ID NO: 10106 - DNA, 23 bp, Artificial Sequence
  Synthetic
ccgttttttttttttagaaacca

SEQ ID NO: 10107 - DNA, 23 bp, Artificial Sequence
  Synthetic
ccgttttttttttttcatgctca

SEQ ID NO: 10108 - DNA, 23 bp, Artificial Sequence
  Synthetic
ccgttttttttttttgtcagcag

SEQ ID NO: 10109 - DNA, 23 bp, Artificial Sequence
  Synthetic
ccgttttttttttttatcactcc

SEQ ID NO: 10110 - DNA, 23 bp, Artificial Sequence
  Synthetic
ccgttttttttttttaaccaaga

SEQ ID NO: 10111 - DNA, 23 bp, Artificial Sequence
  Synthetic
ccgttttttttttttagctcaga

SEQ ID NO: 10112 - DNA, 23 bp, Artificial Sequence
  Synthetic
ccgttttttttttttggccctga

SEQ ID NO: 10113 - DNA, 23 bp, Artificial Sequence
  Synthetic
ccgttttttttttttgtcgattc

SEQ ID NO: 10114 - DNA, 23 bp, Artificial Sequence
  Synthetic
ccgttttttttttttacaaggat

SEQ ID NO: 10115 - DNA, 23 bp, Artificial Sequence
  Synthetic
ccgttttttttttttcatacagc

SEQ ID NO: 10116 - DNA, 23 bp, Artificial Sequence
  Synthetic
ccgttttttttttttactttcgg

SEQ ID NO: 10117 - DNA, 23 bp, Artificial Sequence
  Synthetic
ccgttttttttttttcaggccgg

SEQ ID NO: 10118 - DNA, 23 bp, Artificial Sequence
  Synthetic
ccgttttttttttttgaggccgg

SEQ ID NO: 10119 - DNA, 23 bp, Artificial Sequence
  Synthetic
ccgttttttttttttctacctgc

SEQ ID NO: 10120 - DNA, 23 bp, Artificial Sequence
  Synthetic
ccgttttttttttttgctcaata

SEQ ID NO: 10121 - DNA, 23 bp, Artificial Sequence
  Synthetic
ccgttttttttttttgcaaaaat

SEQ ID NO: 10122 - DNA, 23 bp, Artificial Sequence
  Synthetic
ccgttttttttttttaacaatac

SEQ ID NO: 10123 - DNA, 23 bp, Artificial Sequence
  Synthetic
ccgttttttttttttcacaagat

SEQ ID NO: 10124 - DNA, 23 bp, Artificial Sequence
  Synthetic
ccgttttttttttttcgcaaggt

SEQ ID NO: 10125 - DNA, 23 bp, Artificial Sequence
  Synthetic
ccgttttttttttttcttccact

SEQ ID NO: 10126 - DNA, 23 bp, Artificial Sequence
  Synthetic
ccgttttttttttttgcttacac

SEQ ID NO: 10127 - DNA, 23 bp, Artificial Sequence
  Synthetic
ccgttttttttttttgccactcg

SEQ ID NO: 10128 - DNA, 23 bp, Artificial Sequence
  Synthetic
ccgttttttttttttgccactcg

SEQ ID NO: 10129 - DNA, 23 bp, Artificial Sequence
  Synthetic
ccgttttttttttttcggacaca

SEQ ID NO: 10130 - DNA, 23 bp, Artificial Sequence
  Synthetic
ccgttttttttttttcggagagg

SEQ ID NO: 10131 - DNA, 23 bp, Artificial Sequence
  Synthetic
ccgttttttttttttcagatcga

SEQ ID NO: 10132 - DNA, 23 bp, Artificial Sequence
  Synthetic
ccgttttttttttttcgctgccg

SEQ ID NO: 10133 - DNA, 23 bp, Artificial Sequence
  Synthetic
ccgttttttttttttgtcacatt

SEQ ID NO: 10134 - DNA, 23 bp, Artificial Sequence
  Synthetic
ccgttttttttttttcagctagg

SEQ ID NO: 10135 - DNA, 23 bp, Artificial Sequence
  Synthetic
ccgttttttttttttcctagagt

SEQ ID NO: 10136 - DNA, 23 bp, Artificial Sequence
  Synthetic
ccgttttttttttttccggcaag

SEQ ID NO: 10137 - DNA, 23 bp, Artificial Sequence
  Synthetic
ccgttttttttttttctcaacag

SEQ ID NO: 10138 - DNA, 23 bp, Artificial Sequence
  Synthetic
ccgttttttttttttccgatgga

SEQ ID NO: 10139 - DNA, 23 bp, Artificial Sequence
  Synthetic
ccgttttttttttttagcgccag

SEQ ID NO: 10140 - DNA, 23 bp, Artificial Sequence
  Synthetic
ccgttttttttttttcgtgctct

SEQ ID NO: 10141 - DNA, 23 bp, Artificial Sequence
  Synthetic
ccgttttttttttttacgcagct

SEQ ID NO: 10142 - DNA, 23 bp, Artificial Sequence
  Synthetic
ccgttttttttttttagcggggt

SEQ ID NO: 10143 - DNA, 23 bp, Artificial Sequence
  Synthetic
ccgttttttttttttcacaagtt

SEQ ID NO: 10144 - DNA, 23 bp, Artificial Sequence
  Synthetic
ccgttttttttttttcacaaacc

SEQ ID NO: 10145 - DNA, 23 bp, Artificial Sequence
  Synthetic
ccgttttttttttttcaccaata

SEQ ID NO: 10146 - DNA, 23 bp, Artificial Sequence
  Synthetic
ccgttttttttttttacaagtgc

SEQ ID NO: 10147 - DNA, 23 bp, Artificial Sequence
  Synthetic
ccgttttttttttttactacctg

SEQ ID NO: 10148 - DNA, 23 bp, Artificial Sequence
  Synthetic
ccgttttttttttttatctgcac

SEQ ID NO: 10149 - DNA, 23 bp, Artificial Sequence
  Synthetic
ccgttttttttttttcagttttg

SEQ ID NO: 10150 - DNA, 23 bp, Artificial Sequence
  Synthetic
ccgttttttttttttcagttttg

SEQ ID NO: 10151 - DNA, 23 bp, Artificial Sequence
  Synthetic
ccgttttttttttttacctgcac

SEQ ID NO: 10152 - DNA, 23 bp, Artificial Sequence
  Synthetic
ccgttttttttttttcacagttg

SEQ ID NO: 10153 - DNA, 23 bp, Artificial Sequence
  Synthetic
ccgttttttttttttacatggtt

SEQ ID NO: 10154 - DNA, 23 bp, Artificial Sequence
  Synthetic
ccgttttttttttttacagttct

SEQ ID NO: 10155 - DNA, 23 bp, Artificial Sequence
  Synthetic
ccgttttttttttttggaaatcc

SEQ ID NO: 10156 - DNA, 23 bp, Artificial Sequence
  Synthetic
ccgttttttttttttggcggaac

SEQ ID NO: 10157 - DNA, 23 bp, Artificial Sequence
  Synthetic
ccgttttttttttttacaggccg

SEQ ID NO: 10158 - DNA, 23 bp, Artificial Sequence
  Synthetic
ccgttttttttttttcacaagtt

SEQ ID NO: 10159 - DNA, 23 bp, Artificial Sequence
  Synthetic
ccgttttttttttttcttcagtt

SEQ ID NO: 10160 - DNA, 23 bp, Artificial Sequence
  Synthetic
ccgttttttttttttcatagccc

SEQ ID NO: 10161 - DNA, 23 bp, Artificial Sequence
  Synthetic
ccgttttttttttttacaggagt

SEQ ID NO: 10162 - DNA, 23 bp, Artificial Sequence
  Synthetic
ccgttttttttttttatctgcac

SEQ ID NO: 10163 - DNA, 23 bp, Artificial Sequence
  Synthetic
ccgttttttttttttgatagccc

SEQ ID NO: 10164 - DNA, 23 bp, Artificial Sequence
  Synthetic
ccgttttttttttttggcattca

SEQ ID NO: 10165 - DNA, 23 bp, Artificial Sequence
  Synthetic
ccgttttttttttttcacaagtt

SEQ ID NO: 10166 - DNA, 23 bp, Artificial Sequence
  Synthetic
ccgttttttttttttagccaagc

SEQ ID NO: 10167 - DNA, 23 bp, Artificial Sequence
  Synthetic
ccgttttttttttttacagctgg

SEQ ID NO: 10168 - DNA, 23 bp, Artificial Sequence
  Synthetic
ccgttttttttttttcacatagg

SEQ ID NO: 10169 - DNA, 23 bp, Artificial Sequence
  Synthetic
ccgttttttttttttagacacgt

SEQ ID NO: 10170 - DNA, 23 bp, Artificial Sequence
  Synthetic
ccgttttttttttttgagctaca

SEQ ID NO: 10171 - DNA, 23 bp, Artificial Sequence
  Synthetic
ccgttttttttttttcacaaacc

SEQ ID NO: 10172 - DNA, 23 bp, Artificial Sequence
  Synthetic
ccgttttttttttttgtaaacca

SEQ ID NO: 10173 - DNA, 23 bp, Artificial Sequence
  Synthetic
ccgttttttttttttcgccaata

SEQ ID NO: 10174 - DNA, 23 bp, Artificial Sequence
  Synthetic
ccgttttttttttttacaagtgc

SEQ ID NO: 10175 - DNA, 23 bp, Artificial Sequence
  Synthetic
ccgttttttttttttactacctg

SEQ ID NO: 10176 - DNA, 23 bp, Artificial Sequence
  Synthetic
ccgttttttttttttatctgcac

SEQ ID NO: 10177 - DNA, 23 bp, Artificial Sequence
  Synthetic
ccgttttttttttttactcaccg

SEQ ID NO: 10178 - DNA, 23 bp, Artificial Sequence
  Synthetic
ccgttttttttttttggtacaat

SEQ ID NO: 10179 - DNA, 23 bp, Artificial Sequence
  Synthetic
ccgttttttttttttaacccacc

SEQ ID NO: 10180 - DNA, 23 bp, Artificial Sequence
  Synthetic
ccgttttttttttttcccaacaa

SEQ ID NO: 10181 - DNA, 23 bp, Artificial Sequence
  Synthetic
ccgttttttttttttcctagctc

SEQ ID NO: 10182 - DNA, 23 bp, Artificial Sequence
  Synthetic
ccgttttttttttttgaacaggt

SEQ ID NO: 10183 - DNA, 23 bp, Artificial Sequence
  Synthetic
ccgttttttttttttcagttttg

SEQ ID NO: 10184 - DNA, 23 bp, Artificial Sequence
  Synthetic
ccgttttttttttttcagttttg

SEQ ID NO: 10185 - DNA, 23 bp, Artificial Sequence
  Synthetic
ccgttttttttttttacctgcac

SEQ ID NO: 10186 - DNA, 23 bp, Artificial Sequence
  Synthetic
ccgttttttttttttcagactcc

SEQ ID NO: 10187 - DNA, 23 bp, Artificial Sequence
  Synthetic
ccgttttttttttttacatggtt

SEQ ID NO: 10188 - DNA, 23 bp, Artificial Sequence
  Synthetic
ccgttttttttttttacagttct

SEQ ID NO: 10189 - DNA, 23 bp, Artificial Sequence
  Synthetic
ccgttttttttttttcagaccga

SEQ ID NO: 10190 - DNA, 23 bp, Artificial Sequence
  Synthetic
ccgttttttttttttagcctatc

SEQ ID NO: 10191 - DNA, 23 bp, Artificial Sequence
  Synthetic
ccgttttttttttttctcaatag

SEQ ID NO: 10192 - DNA, 23 bp, Artificial Sequence
  Synthetic
ccgttttttttttttaaccgatt

SEQ ID NO: 10193 - DNA, 23 bp, Artificial Sequence
  Synthetic
ccgttttttttttttactgattt

SEQ ID NO: 10194 - DNA, 23 bp, Artificial Sequence
  Synthetic
ccgttttttttttttgctgagtg

SEQ ID NO: 10195 - DNA, 23 bp, Artificial Sequence
  Synthetic
ccgttttttttttttgctgagag

SEQ ID NO: 10196 - DNA, 23 bp, Artificial Sequence
  Synthetic
ccgttttttttttttacaaccag

SEQ ID NO: 10197 - DNA, 23 bp, Artificial Sequence
  Synthetic
ccgttttttttttttaacaaaat

SEQ ID NO: 10198 - DNA, 23 bp, Artificial Sequence
  Synthetic
ccgttttttttttttcatacagc

SEQ ID NO: 10199 - DNA, 23 bp, Artificial Sequence
  Synthetic
ccgttttttttttttacaggccg

SEQ ID NO: 10200 - DNA, 23 bp, Artificial Sequence
  Synthetic
ccgttttttttttttctacctgc

SEQ ID NO: 10201 - DNA, 23 bp, Artificial Sequence
  Synthetic
ccgttttttttttttgctcaata

SEQ ID NO: 10202 - DNA, 23 bp, Artificial Sequence
  Synthetic
ccgttttttttttttcacaagat

SEQ ID NO: 10203 - DNA, 23 bp, Artificial Sequence
  Synthetic
ccgttttttttttttaactatac

SEQ ID NO: 10204 - DNA, 23 bp, Artificial Sequence
  Synthetic
ccgttttttttttttaaccacac

SEQ ID NO: 10205 - DNA, 23 bp, Artificial Sequence
  Synthetic
ccgttttttttttttactatgca

SEQ ID NO: 10206 - DNA, 23 bp, Artificial Sequence
  Synthetic
ccgttttttttttttaactatac

SEQ ID NO: 10207 - DNA, 23 bp, Artificial Sequence
  Synthetic
ccgttttttttttttactgtaca

SEQ ID NO: 10208 - DNA, 23 bp, Artificial Sequence
  Synthetic
ccgttttttttttttacagcaca

SEQ ID NO: 10209 - DNA, 23 bp, Artificial Sequence
  Synthetic
ccgttttttttttttacatactt

SEQ ID NO: 10210 - DNA, 23 bp, Artificial Sequence
  Synthetic
ccgttttttttttttacaagttc

SEQ ID NO: 10211 - DNA, 23 bp, Artificial Sequence
  Synthetic
ccgttttttttttttcttcagtt

SEQ ID NO: 10212 - DNA, 23 bp, Artificial Sequence
  Synthetic
ccgttttttttttttcatagccc

SEQ ID NO: 10213 - DNA, 23 bp, Artificial Sequence
  Synthetic
ccgttttttttttttgatagccc

SEQ ID NO: 10214 - DNA, 23 bp, Artificial Sequence
  Synthetic
ccgttttttttttttcacaaatt

SEQ ID NO: 10215 - DNA, 23 bp, Artificial Sequence
  Synthetic
ccgttttttttttttacaaattc

SEQ ID NO: 10216 - DNA, 23 bp, Artificial Sequence
  Synthetic
ccgttttttttttttacacaaac

SEQ ID NO: 10217 - DNA, 23 bp, Artificial Sequence
  Synthetic
ccgttttttttttttggcattca

SEQ ID NO: 10218 - DNA, 23 bp, Artificial Sequence
  Synthetic
ccgttttttttttttcacaagtt

SEQ ID NO: 10219 - DNA, 23 bp, Artificial Sequence
  Synthetic
ccgttttttttttttaaagagac

SEQ ID NO: 10220 - DNA, 23 bp, Artificial Sequence
  Synthetic
ccgttttttttttttagcaagcc

SEQ ID NO: 10221 - DNA, 23 bp, Artificial Sequence
  Synthetic
ccgttttttttttttatgccctt

SEQ ID NO: 10222 - DNA, 23 bp, Artificial Sequence
  Synthetic
ccgttttttttttttcgaccatg

SEQ ID NO: 10223 - DNA, 23 bp, Artificial Sequence
  Synthetic
ccgttttttttttttacagctgg

SEQ ID NO: 10224 - DNA, 23 bp, Artificial Sequence
  Synthetic
ccgttttttttttttcacatagg

SEQ ID NO: 10225 - DNA, 23 bp, Artificial Sequence
  Synthetic
ccgttttttttttttcacatagg

SEQ ID NO: 10226 - DNA, 23 bp, Artificial Sequence
  Synthetic
ccgttttttttttttctacgcgt

SEQ ID NO: 10227 - DNA, 23 bp, Artificial Sequence
  Synthetic
ccgttttttttttttgattcaca

SEQ ID NO: 10228 - DNA, 23 bp, Artificial Sequence
  Synthetic
ccgttttttttttttgcatcttt

SEQ ID NO: 10229 - DNA, 23 bp, Artificial Sequence
  Synthetic
ccgttttttttttttccataaag

SEQ ID NO: 10230 - DNA, 23 bp, Artificial Sequence
  Synthetic
ccgttttttttttttcgagctac

SEQ ID NO: 10231 - DNA, 23 bp, Artificial Sequence
  Synthetic
ccgttttttttttttccagtaca

SEQ ID NO: 10232 - DNA, 23 bp, Artificial Sequence
  Synthetic
ccgttttttttttttagggattc

SEQ ID NO: 10233 - DNA, 23 bp, Artificial Sequence
  Synthetic
ccgttttttttttttcccaagtt

SEQ ID NO: 10234 - DNA, 23 bp, Artificial Sequence
  Synthetic
ccgttttttttttttaacaaacc

SEQ ID NO: 10235 - DNA, 23 bp, Artificial Sequence
  Synthetic
ccgttttttttttttcgccaata

SEQ ID NO: 10236 - DNA, 23 bp, Artificial Sequence
  Synthetic
ccgttttttttttttacaagtgc

SEQ ID NO: 10237 - DNA, 23 bp, Artificial Sequence
  Synthetic
ccgttttttttttttactacctg

SEQ ID NO: 10238 - DNA, 23 bp, Artificial Sequence
  Synthetic
ccgttttttttttttatctgcac

SEQ ID NO: 10239 - DNA, 23 bp, Artificial Sequence
  Synthetic
ccgttttttttttttactcaccg

SEQ ID NO: 10240 - DNA, 23 bp, Artificial Sequence
  Synthetic
ccgttttttttttttcccaccga

SEQ ID NO: 10241 - DNA, 23 bp, Artificial Sequence
  Synthetic
ccgttttttttttttactcaccg

SEQ ID NO: 10242 - DNA, 23 bp, Artificial Sequence
  Synthetic
ccgttttttttttttgtgagttc

SEQ ID NO: 10243 - DNA, 23 bp, Artificial Sequence
  Synthetic
ccgttttttttttttcagtgaat

SEQ ID NO: 10244 - DNA, 23 bp, Artificial Sequence
  Synthetic
ccgttttttttttttacccttat

SEQ ID NO: 10245 - DNA, 23 bp, Artificial Sequence
  Synthetic
ccgttttttttttttaagcccaa

SEQ ID NO: 10246 - DNA, 23 bp, Artificial Sequence
  Synthetic
ccgttttttttttttggctgcaa

SEQ ID NO: 10247 - DNA, 23 bp, Artificial Sequence
  Synthetic
ccgttttttttttttagctgctt

SEQ ID NO: 10248 - DNA, 23 bp, Artificial Sequence
  Synthetic
ccgttttttttttttctgggact

SEQ ID NO: 10249 - DNA, 23 bp, Artificial Sequence
  Synthetic
ccgttttttttttttccaacaac

SEQ ID NO: 10250 - DNA, 23 bp, Artificial Sequence
  Synthetic
ccgttttttttttttgaacagat

SEQ ID NO: 10251 - DNA, 23 bp, Artificial Sequence
  Synthetic
ccgttttttttttttcagttttg

SEQ ID NO: 10252 - DNA, 23 bp, Artificial Sequence
  Synthetic
ccgttttttttttttcagttttg

SEQ ID NO: 10253 - DNA, 23 bp, Artificial Sequence
  Synthetic
ccgttttttttttttctacctgc

SEQ ID NO: 10254 - DNA, 23 bp, Artificial Sequence
  Synthetic
ccgttttttttttttacatcgtt

SEQ ID NO: 10255 - DNA, 23 bp, Artificial Sequence
  Synthetic
ccgttttttttttttccagcact

SEQ ID NO: 10256 - DNA, 23 bp, Artificial Sequence
  Synthetic
ccgttttttttttttcatcatta

SEQ ID NO: 10257 - DNA, 23 bp, Artificial Sequence
  Synthetic
ccgttttttttttttccatcatt

SEQ ID NO: 10258 - DNA, 23 bp, Artificial Sequence
  Synthetic
ccgttttttttttttcaagtggt

SEQ ID NO: 10259 - DNA, 23 bp, Artificial Sequence
  Synthetic
ccgttttttttttttaggcatag

SEQ ID NO: 10260 - DNA, 23 bp, Artificial Sequence
  Synthetic
ccgttttttttttttcacacact

SEQ ID NO: 10261 - DNA, 23 bp, Artificial Sequence
  Synthetic
ccgttttttttttttacgagctt

SEQ ID NO: 10262 - DNA, 23 bp, Artificial Sequence
  Synthetic
ccgttttttttttttcaacatca

SEQ ID NO: 10263 - DNA, 23 bp, Artificial Sequence
  Synthetic
ccgttttttttttttggccgtga

SEQ ID NO: 10264 - DNA, 23 bp, Artificial Sequence
  Synthetic
ccgttttttttttttctgcctgt

SEQ ID NO: 10265 - DNA, 23 bp, Artificial Sequence
  Synthetic
ccgttttttttttttcacagttg

SEQ ID NO: 10266 - DNA, 23 bp, Artificial Sequence
  Synthetic
ccgttttttttttttatccaatc

SEQ ID NO: 10267 - DNA, 23 bp, Artificial Sequence
  Synthetic
ccgttttttttttttacatggtt

SEQ ID NO: 10268 - DNA, 23 bp, Artificial Sequence
  Synthetic
ccgttttttttttttagaattgc

SEQ ID NO: 10269 - DNA, 23 bp, Artificial Sequence
  Synthetic
ccgttttttttttttgcagttct

SEQ ID NO: 10270 - DNA, 23 bp, Artificial Sequence
  Synthetic
ccgttttttttttttgaaaccca

SEQ ID NO: 10271 - DNA, 23 bp, Artificial Sequence
  Synthetic
ccgttttttttttttgagaccca

SEQ ID NO: 10272 - DNA, 23 bp, Artificial Sequence
  Synthetic
ccgttttttttttttggggtatt

SEQ ID NO: 10273 - DNA, 23 bp, Artificial Sequence
  Synthetic
ccgttttttttttttgaaatccc

SEQ ID NO: 10274 - DNA, 23 bp, Artificial Sequence
  Synthetic
ccgttttttttttttggtaatcc

SEQ ID NO: 10275 - DNA, 23 bp, Artificial Sequence
  Synthetic
ccgttttttttttttctgctgaa

SEQ ID NO: 10276 - DNA, 23 bp, Artificial Sequence
  Synthetic
ccgttttttttttttcagaccga

SEQ ID NO: 10277 - DNA, 23 bp, Artificial Sequence
  Synthetic
ccgttttttttttttgcggaact

SEQ ID NO: 10278 - DNA, 23 bp, Artificial Sequence
  Synthetic
ccgttttttttttttgcagaact

SEQ ID NO: 10279 - DNA, 23 bp, Artificial Sequence
  Synthetic
ccgttttttttttttaccgattt

SEQ ID NO: 10280 - DNA, 23 bp, Artificial Sequence
  Synthetic
ccgttttttttttttactgattt

SEQ ID NO: 10281 - DNA, 23 bp, Artificial Sequence
  Synthetic
ccgttttttttttttctaaaaca

SEQ ID NO: 10282 - DNA, 23 bp, Artificial Sequence
  Synthetic
ccgttttttttttttccaaaaca

SEQ ID NO: 10283 - DNA, 23 bp, Artificial Sequence
  Synthetic
ccgttttttttttttactgaaac

SEQ ID NO: 10284 - DNA, 23 bp, Artificial Sequence
  Synthetic
ccgttttttttttttactcaaac

SEQ ID NO: 10285 - DNA, 23 bp, Artificial Sequence
  Synthetic
ccgttttttttttttcttccagt

SEQ ID NO: 10286 - DNA, 23 bp, Artificial Sequence
  Synthetic
ccgttttttttttttcagctatg

SEQ ID NO: 10287 - DNA, 23 bp, Artificial Sequence
  Synthetic
ccgttttttttttttgcaactta

SEQ ID NO: 10288 - DNA, 23 bp, Artificial Sequence
  Synthetic
ccgttttttttttttcaacaaaa

SEQ ID NO: 10289 - DNA, 23 bp, Artificial Sequence
  Synthetic
ccgttttttttttttaacaacca

SEQ ID NO: 10290 - DNA, 23 bp, Artificial Sequence
  Synthetic
ccgttttttttttttataaggat

SEQ ID NO: 10291 - DNA, 23 bp, Artificial Sequence
  Synthetic
ccgttttttttttttcaccattg

SEQ ID NO: 10292 - DNA, 23 bp, Artificial Sequence
  Synthetic
ccgttttttttttttcacgcgag

SEQ ID NO: 10293 - DNA, 23 bp, Artificial Sequence
  Synthetic
ccgttttttttttttagccacaa

SEQ ID NO: 10294 - DNA, 23 bp, Artificial Sequence
  Synthetic
ccgttttttttttttggacggac

SEQ ID NO: 10295 - DNA, 23 bp, Artificial Sequence
  Synthetic
ccgttttttttttttaccagcta

SEQ ID NO: 10296 - DNA, 23 bp, Artificial Sequence
  Synthetic
ccgttttttttttttaacacagt

SEQ ID NO: 10297 - DNA, 23 bp, Artificial Sequence
  Synthetic
ccgttttttttttttcaacaaaa

SEQ ID NO: 10298 - DNA, 23 bp, Artificial Sequence
  Synthetic
ccgttttttttttttcatacagc

SEQ ID NO: 10299 - DNA, 23 bp, Artificial Sequence
  Synthetic
ccgttttttttttttactttcgg

SEQ ID NO: 10300 - DNA, 23 bp, Artificial Sequence
  Synthetic
ccgttttttttttttcaggccgg

SEQ ID NO: 10301 - DNA, 23 bp, Artificial Sequence
  Synthetic
ccgttttttttttttctacctgc

SEQ ID NO: 10302 - DNA, 23 bp, Artificial Sequence
  Synthetic
ccgttttttttttttagcaaaaa

SEQ ID NO: 10303 - DNA, 23 bp, Artificial Sequence
  Synthetic
ccgttttttttttttgccgcaca

SEQ ID NO: 10304 - DNA, 23 bp, Artificial Sequence
  Synthetic
ccgttttttttttttcggactac

SEQ ID NO: 10305 - DNA, 23 bp, Artificial Sequence
  Synthetic
ccgttttttttttttaagctatt

SEQ ID NO: 10306 - DNA, 23 bp, Artificial Sequence
  Synthetic
ccgttttttttttttgcgggaga

SEQ ID NO: 10307 - DNA, 23 bp, Artificial Sequence
  Synthetic
ccgttttttttttttgaagggtt

SEQ ID NO: 10308 - DNA, 23 bp, Artificial Sequence
  Synthetic
ccgttttttttttttggtcatgc

SEQ ID NO: 10309 - DNA, 23 bp, Artificial Sequence
  Synthetic
ccgttttttttttttacagtaga

SEQ ID NO: 10310 - DNA, 23 bp, Artificial Sequence
  Synthetic
ccgttttttttttttactgtcat

SEQ ID NO: 10311 - DNA, 23 bp, Artificial Sequence
  Synthetic
ccgttttttttttttctgtaatc

SEQ ID NO: 10312 - DNA, 23 bp, Artificial Sequence
  Synthetic
ccgttttttttttttactattgt

SEQ ID NO: 10313 - DNA, 23 bp, Artificial Sequence
  Synthetic
ccgttttttttttttaaaggaag

SEQ ID NO: 10314 - DNA, 23 bp, Artificial Sequence
  Synthetic
ccgttttttttttttaaagaggg

SEQ ID NO: 10315 - DNA, 23 bp, Artificial Sequence
  Synthetic
ccgttttttttttttaagcgcaa

SEQ ID NO: 10316 - DNA, 23 bp, Artificial Sequence
  Synthetic
ccgttttttttttttagaataac

SEQ ID NO: 10317 - DNA, 23 bp, Artificial Sequence
  Synthetic
ccgttttttttttttgagacgac

SEQ ID NO: 10318 - DNA, 23 bp, Artificial Sequence
  Synthetic
ccgttttttttttttaaaaccac

SEQ ID NO: 10319 - DNA, 23 bp, Artificial Sequence
  Synthetic
ccgttttttttttttaataaagg

SEQ ID NO: 10320 - DNA, 23 bp, Artificial Sequence
  Synthetic
ccgttttttttttttaggttacc

SEQ ID NO: 10321 - DNA, 23 bp, Artificial Sequence
  Synthetic
ccgttttttttttttgaccaaac

SEQ ID NO: 10322 - DNA, 23 bp, Artificial Sequence
  Synthetic
ccgttttttttttttaaaaaggt

SEQ ID NO: 10323 - DNA, 23 bp, Artificial Sequence
  Synthetic
ccgttttttttttttcacaagtt

SEQ ID NO: 10324 - DNA, 23 bp, Artificial Sequence
  Synthetic
ccgttttttttttttcttcagtt

SEQ ID NO: 10325 - DNA, 23 bp, Artificial Sequence
  Synthetic
ccgttttttttttttcatagccc

SEQ ID NO: 10326 - DNA, 23 bp, Artificial Sequence
  Synthetic
ccgttttttttttttacaggagt

SEQ ID NO: 10327 - DNA, 23 bp, Artificial Sequence
  Synthetic
ccgttttttttttttgctacctg

SEQ ID NO: 10328 - DNA, 23 bp, Artificial Sequence
  Synthetic
ccgttttttttttttatctgcac

SEQ ID NO: 10329 - DNA, 23 bp, Artificial Sequence
  Synthetic
ccgttttttttttttgatagccc

SEQ ID NO: 10330 - DNA, 23 bp, Artificial Sequence
  Synthetic
ccgttttttttttttggcattca

SEQ ID NO: 10331 - DNA, 23 bp, Artificial Sequence
  Synthetic
ccgttttttttttttcacaagtt

SEQ ID NO: 10332 - DNA, 23 bp, Artificial Sequence
  Synthetic
ccgttttttttttttagccaagc

SEQ ID NO: 10333 - DNA, 23 bp, Artificial Sequence
  Synthetic
ccgttttttttttttaaaagaga

SEQ ID NO: 10334 - DNA, 23 bp, Artificial Sequence
  Synthetic
ccgttttttttttttgccctttt

SEQ ID NO: 10335 - DNA, 23 bp, Artificial Sequence
  Synthetic
ccgttttttttttttacagctgg

SEQ ID NO: 10336 - DNA, 23 bp, Artificial Sequence
  Synthetic
ccgttttttttttttcacatagg

SEQ ID NO: 10337 - DNA, 23 bp, Artificial Sequence
  Synthetic
ccgttttttttttttccatcttt

SEQ ID NO: 10338 - DNA, 23 bp, Artificial Sequence
  Synthetic
ccgttttttttttttaagggatt

SEQ ID NO: 10339 - DNA, 23 bp, Artificial Sequence
  Synthetic
ccgttttttttttttcacttttg

SEQ ID NO: 10340 - DNA, 23 bp, Artificial Sequence
  Synthetic
ccgttttttttttttcacaaacc

SEQ ID NO: 10341 - DNA, 23 bp, Artificial Sequence
  Synthetic
ccgttttttttttttgtaaacca

SEQ ID NO: 10342 - DNA, 23 bp, Artificial Sequence
  Synthetic
ccgttttttttttttcgccaata

SEQ ID NO: 10343 - DNA, 23 bp, Artificial Sequence
  Synthetic
ccgttttttttttttacaagtgc

SEQ ID NO: 10344 - DNA, 23 bp, Artificial Sequence
  Synthetic
ccgttttttttttttactacctg

SEQ ID NO: 10345 - DNA, 23 bp, Artificial Sequence
  Synthetic
ccgttttttttttttatctgcac

SEQ ID NO: 10346 - DNA, 23 bp, Artificial Sequence
  Synthetic
ccgttttttttttttactcaccg

SEQ ID NO: 10347 - DNA, 23 bp, Artificial Sequence
  Synthetic
ccgttttttttttttggtacaat

SEQ ID NO: 10348 - DNA, 23 bp, Artificial Sequence
  Synthetic
ccgttttttttttttaacccacc

SEQ ID NO: 10349 - DNA, 23 bp, Artificial Sequence
  Synthetic
ccgttttttttttttactcaccg

SEQ ID NO: 10350 - DNA, 23 bp, Artificial Sequence
  Synthetic
ccgttttttttttttgtgagttc

SEQ ID NO: 10351 - DNA, 23 bp, Artificial Sequence
  Synthetic
ccgttttttttttttcagtgaat

SEQ ID NO: 10352 - DNA, 23 bp, Artificial Sequence
  Synthetic
ccgttttttttttttaccctcca

SEQ ID NO: 10353 - DNA, 23 bp, Artificial Sequence
  Synthetic
ccgttttttttttttactgatat

SEQ ID NO: 10354 - DNA, 23 bp, Artificial Sequence
  Synthetic
ccgttttttttttttacctaata

SEQ ID NO: 10355 - DNA, 23 bp, Artificial Sequence
  Synthetic
ccgttttttttttttccacatgg

SEQ ID NO: 10356 - DNA, 23 bp, Artificial Sequence
  Synthetic
ccgttttttttttttccaacaac

SEQ ID NO: 10357 - DNA, 23 bp, Artificial Sequence
  Synthetic
ccgttttttttttttcctatttc

SEQ ID NO: 10358 - DNA, 23 bp, Artificial Sequence
  Synthetic
ccgttttttttttttgaacaggt

SEQ ID NO: 10359 - DNA, 23 bp, Artificial Sequence
  Synthetic
ccgttttttttttttcagttttg

SEQ ID NO: 10360 - DNA, 23 bp, Artificial Sequence
  Synthetic
ccgttttttttttttcagttttg

SEQ ID NO: 10361 - DNA, 23 bp, Artificial Sequence
  Synthetic
ccgttttttttttttacctgcac

SEQ ID NO: 10362 - DNA, 23 bp, Artificial Sequence
  Synthetic
ccgttttttttttttccatcatt

SEQ ID NO: 10363 - DNA, 23 bp, Artificial Sequence
  Synthetic
ccgttttttttttttcaacatca

SEQ ID NO: 10364 - DNA, 23 bp, Artificial Sequence
  Synthetic
ccgttttttttttttaggcaaag

SEQ ID NO: 10365 - DNA, 23 bp, Artificial Sequence
  Synthetic
ccgttttttttttttctgcctgt

SEQ ID NO: 10366 - DNA, 23 bp, Artificial Sequence
  Synthetic
ccgttttttttttttgtctgtca

SEQ ID NO: 10367 - DNA, 23 bp, Artificial Sequence
  Synthetic
ccgttttttttttttacatggtt

SEQ ID NO: 10368 - DNA, 23 bp, Artificial Sequence
  Synthetic
ccgttttttttttttagaattgc

SEQ ID NO: 10369 - DNA, 23 bp, Artificial Sequence
  Synthetic
ccgttttttttttttacagttct

SEQ ID NO: 10370 - DNA, 23 bp, Artificial Sequence
  Synthetic
ccgttttttttttttaaagtgtc

SEQ ID NO: 10371 - DNA, 23 bp, Artificial Sequence
  Synthetic
ccgttttttttttttgaaaccca

SEQ ID NO: 10372 - DNA, 23 bp, Artificial Sequence
  Synthetic
ccgttttttttttttggggtatt

SEQ ID NO: 10373 - DNA, 23 bp, Artificial Sequence
  Synthetic
ccgttttttttttttaaacggaa

SEQ ID NO: 10374 - DNA, 23 bp, Artificial Sequence
  Synthetic
ccgttttttttttttggaaatcc

SEQ ID NO: 10375 - DNA, 23 bp, Artificial Sequence
  Synthetic
ccgttttttttttttctgttcct

SEQ ID NO: 10376 - DNA, 23 bp, Artificial Sequence
  Synthetic
ccgttttttttttttcagaccga

SEQ ID NO: 10377 - DNA, 23 bp, Artificial Sequence
  Synthetic
ccgttttttttttttagcctatc

SEQ ID NO: 10378 - DNA, 23 bp, Artificial Sequence
  Synthetic
ccgttttttttttttggcggaac

SEQ ID NO: 10379 - DNA, 23 bp, Artificial Sequence
  Synthetic
ccgttttttttttttctcaatag

SEQ ID NO: 10380 - DNA, 23 bp, Artificial Sequence
  Synthetic
ccgttttttttttttaaccgatt

SEQ ID NO: 10381 - DNA, 23 bp, Artificial Sequence
  Synthetic
ccgttttttttttttgctgcaaa

SEQ ID NO: 10382 - DNA, 23 bp, Artificial Sequence
  Synthetic
ccgttttttttttttcttccagt

SEQ ID NO: 10383 - DNA, 23 bp, Artificial Sequence
  Synthetic
ccgttttttttttttgctgagtg

SEQ ID NO: 10384 - DNA, 23 bp, Artificial Sequence
  Synthetic
ccgttttttttttttcagctatg

SEQ ID NO: 10385 - DNA, 23 bp, Artificial Sequence
  Synthetic
ccgttttttttttttgcaactta

SEQ ID NO: 10386 - DNA, 23 bp, Artificial Sequence
  Synthetic
ccgttttttttttttcaatgcaa

SEQ ID NO: 10387 - DNA, 23 bp, Artificial Sequence
  Synthetic
ccgttttttttttttacaaccag

SEQ ID NO: 10388 - DNA, 23 bp, Artificial Sequence
  Synthetic
ccgttttttttttttacaggccg

SEQ ID NO: 10389 - DNA, 23 bp, Artificial Sequence
  Synthetic
ccgttttttttttttctacctgc

SEQ ID NO: 10390 - DNA, 23 bp, Artificial Sequence
  Synthetic
ccgttttttttttttgcaaaaat

SEQ ID NO: 10391 - DNA, 23 bp, Artificial Sequence
  Synthetic
ccgttttttttttttaacaatac

SEQ ID NO: 10392 - DNA, 23 bp, Artificial Sequence
  Synthetic
ccgttttttttttttcacaagat

SEQ ID NO: 10393 - DNA, 23 bp, Artificial Sequence
  Synthetic
ccgttttttttttttactataca

SEQ ID NO: 10394 - DNA, 23 bp, Artificial Sequence
  Synthetic
ccgttttttttttttaaccacac

SEQ ID NO: 10395 - DNA, 23 bp, Artificial Sequence
  Synthetic
ccgttttttttttttaaccatac

SEQ ID NO: 10396 - DNA, 23 bp, Artificial Sequence
  Synthetic
ccgttttttttttttactatgca

SEQ ID NO: 10397 - DNA, 23 bp, Artificial Sequence
  Synthetic
ccgttttttttttttagaaaggc

SEQ ID NO: 10398 - DNA, 23 bp, Artificial Sequence
  Synthetic
ccgttttttttttttactataca

SEQ ID NO: 10399 - DNA, 23 bp, Artificial Sequence
  Synthetic
ccgttttttttttttactataca

SEQ ID NO: 10400 - DNA, 23 bp, Artificial Sequence
  Synthetic
ccgttttttttttttactgtaca

SEQ ID NO: 10401 - DNA, 23 bp, Artificial Sequence
  Synthetic
ccgttttttttttttacagcaca

SEQ ID NO: 10402 - DNA, 23 bp, Artificial Sequence
  Synthetic
ccgttttttttttttacatactt

SEQ ID NO: 10403 - DNA, 23 bp, Artificial Sequence
  Synthetic
ccgttttttttttttcacaagtt

SEQ ID NO: 10404 - DNA, 23 bp, Artificial Sequence
  Synthetic
ccgttttttttttttcttcagtt

SEQ ID NO: 10405 - DNA, 23 bp, Artificial Sequence
  Synthetic
ccgttttttttttttcttcagct

SEQ ID NO: 10406 - DNA, 23 bp, Artificial Sequence
  Synthetic
ccgttttttttttttcatagccc

SEQ ID NO: 10407 - DNA, 23 bp, Artificial Sequence
  Synthetic
ccgttttttttttttacctgcac

SEQ ID NO: 10408 - DNA, 23 bp, Artificial Sequence
  Synthetic
ccgttttttttttttatctgcac

SEQ ID NO: 10409 - DNA, 23 bp, Artificial Sequence
  Synthetic
ccgttttttttttttgatagccc

SEQ ID NO: 10410 - DNA, 23 bp, Artificial Sequence
  Synthetic
ccgttttttttttttcacaaatt

SEQ ID NO: 10411 - DNA, 23 bp, Artificial Sequence
  Synthetic
ccgttttttttttttacacaaat

SEQ ID NO: 10412 - DNA, 23 bp, Artificial Sequence
  Synthetic
ccgttttttttttttacaaacac

SEQ ID NO: 10413 - DNA, 23 bp, Artificial Sequence
  Synthetic
ccgttttttttttttggcattca

SEQ ID NO: 10414 - DNA, 23 bp, Artificial Sequence
  Synthetic
ccgttttttttttttcacaggtt

SEQ ID NO: 10415 - DNA, 23 bp, Artificial Sequence
  Synthetic
ccgttttttttttttcacaagtt

SEQ ID NO: 10416 - DNA, 23 bp, Artificial Sequence
  Synthetic
ccgttttttttttttgcattatt

SEQ ID NO: 10417 - DNA, 23 bp, Artificial Sequence
  Synthetic
ccgttttttttttttcgcgtacc

SEQ ID NO: 10418 - DNA, 23 bp, Artificial Sequence
  Synthetic
ccgttttttttttttgccaagct

SEQ ID NO: 10419 - DNA, 23 bp, Artificial Sequence
  Synthetic
ccgttttttttttttaaaagaga

SEQ ID NO: 10420 - DNA, 23 bp, Artificial Sequence
  Synthetic
ccgttttttttttttgaaagaga

SEQ ID NO: 10421 - DNA, 23 bp, Artificial Sequence
  Synthetic
ccgttttttttttttatgctttt

SEQ ID NO: 10422 - DNA, 23 bp, Artificial Sequence
  Synthetic
ccgttttttttttttagcaagcc

SEQ ID NO: 10423 - DNA, 23 bp, Artificial Sequence
  Synthetic
ccgttttttttttttatgccctt

SEQ ID NO: 10424 - DNA, 23 bp, Artificial Sequence
  Synthetic
ccgttttttttttttatgccctt

SEQ ID NO: 10425 - DNA, 23 bp, Artificial Sequence
  Synthetic
ccgttttttttttttcgaccatg

SEQ ID NO: 10426 - DNA, 23 bp, Artificial Sequence
  Synthetic
ccgttttttttttttacagctgg

SEQ ID NO: 10427 - DNA, 23 bp, Artificial Sequence
  Synthetic
ccgttttttttttttatttggtt

SEQ ID NO: 10428 - DNA, 23 bp, Artificial Sequence
  Synthetic
ccgttttttttttttagctggtt

SEQ ID NO: 10429 - DNA, 23 bp, Artificial Sequence
  Synthetic
ccgttttttttttttcccctctg

SEQ ID NO: 10430 - DNA, 23 bp, Artificial Sequence
  Synthetic
ccgttttttttttttcacatagg

SEQ ID NO: 10431 - DNA, 23 bp, Artificial Sequence
  Synthetic
ccgttttttttttttcacatagg

SEQ ID NO: 10432 - DNA, 23 bp, Artificial Sequence
  Synthetic
ccgttttttttttttccatcatc

SEQ ID NO: 10433 - DNA, 23 bp, Artificial Sequence
  Synthetic
ccgttttttttttttctacgcgt

SEQ ID NO: 10434 - DNA, 23 bp, Artificial Sequence
  Synthetic
ccgttttttttttttgattcaca

SEQ ID NO: 10435 - DNA, 23 bp, Artificial Sequence
  Synthetic
ccgttttttttttttagacacgt

SEQ ID NO: 10436 - DNA, 23 bp, Artificial Sequence
  Synthetic
ccgttttttttttttctaccata

SEQ ID NO: 10437 - DNA, 23 bp, Artificial Sequence
  Synthetic
ccgttttttttttttccgtggtt

SEQ ID NO: 10438 - DNA, 23 bp, Artificial Sequence
  Synthetic
ccgttttttttttttccatcttt

SEQ ID NO: 10439 - DNA, 23 bp, Artificial Sequence
  Synthetic
ccgttttttttttttccataaag

SEQ ID NO: 10440 - DNA, 23 bp, Artificial Sequence
  Synthetic
ccgttttttttttttgtagtgct

SEQ ID NO: 10441 - DNA, 23 bp, Artificial Sequence
  Synthetic
ccgttttttttttttgagctaca

SEQ ID NO: 10442 - DNA, 23 bp, Artificial Sequence
  Synthetic
ccgttttttttttttctagtaca

SEQ ID NO: 10443 - DNA, 23 bp, Artificial Sequence
  Synthetic
ccgttttttttttttaagggatt

SEQ ID NO: 10444 - DNA, 23 bp, Artificial Sequence
  Synthetic
ccgttttttttttttaacccatg

SEQ ID NO: 10445 - DNA, 23 bp, Artificial Sequence
  Synthetic
ccgttttttttttttagcctatg

SEQ ID NO: 10446 - DNA, 23 bp, Artificial Sequence
  Synthetic
ccgttttttttttttacaaagtt

SEQ ID NO: 10447 - DNA, 23 bp, Artificial Sequence
  Synthetic
ccgttttttttttttacaaagtt

SEQ ID NO: 10448 - DNA, 23 bp, Artificial Sequence
  Synthetic
ccgttttttttttttggagtgaa

SEQ ID NO: 10449 - DNA, 23 bp, Artificial Sequence
  Synthetic
ccgttttttttttttcactggta

SEQ ID NO: 10450 - DNA, 23 bp, Artificial Sequence
  Synthetic
ccgttttttttttttcctcaagg

SEQ ID NO: 10451 - DNA, 23 bp, Artificial Sequence
  Synthetic
ccgttttttttttttcccaagtt

SEQ ID NO: 10452 - DNA, 23 bp, Artificial Sequence
  Synthetic
ccgttttttttttttgatcactt

SEQ ID NO: 10453 - DNA, 23 bp, Artificial Sequence
  Synthetic
ccgttttttttttttcgaaggca

SEQ ID NO: 10454 - DNA, 23 bp, Artificial Sequence
  Synthetic
ccgttttttttttttcccctatc

SEQ ID NO: 10455 - DNA, 23 bp, Artificial Sequence
  Synthetic
ccgttttttttttttcacaaacc

SEQ ID NO: 10456 - DNA, 23 bp, Artificial Sequence
  Synthetic
ccgttttttttttttgtaaacca

SEQ ID NO: 10457 - DNA, 23 bp, Artificial Sequence
  Synthetic
ccgttttttttttttcgccaata

SEQ ID NO: 10458 - DNA, 23 bp, Artificial Sequence
  Synthetic
ccgttttttttttttacaagtgc

SEQ ID NO: 10459 - DNA, 23 bp, Artificial Sequence
  Synthetic
ccgttttttttttttactacctg

SEQ ID NO: 10460 - DNA, 23 bp, Artificial Sequence
  Synthetic
ccgttttttttttttatctgcac

SEQ ID NO: 10461 - DNA, 23 bp, Artificial Sequence
  Synthetic
ccgttttttttttttactcaccg

SEQ ID NO: 10462 - DNA, 23 bp, Artificial Sequence
  Synthetic
ccgttttttttttttggtacaat

SEQ ID NO: 10463 - DNA, 23 bp, Artificial Sequence
  Synthetic
ccgttttttttttttcccaccga

SEQ ID NO: 10464 - DNA, 23 bp, Artificial Sequence
  Synthetic
ccgttttttttttttactcaccg

SEQ ID NO: 10465 - DNA, 23 bp, Artificial Sequence
  Synthetic
ccgttttttttttttgtgagttc

SEQ ID NO: 10466 - DNA, 23 bp, Artificial Sequence
  Synthetic
ccgttttttttttttcagtgaat

SEQ ID NO: 10467 - DNA, 23 bp, Artificial Sequence
  Synthetic
ccgttttttttttttacccttat

SEQ ID NO: 10468 - DNA, 23 bp, Artificial Sequence
  Synthetic
ccgttttttttttttgaactgcc

SEQ ID NO: 10469 - DNA, 23 bp, Artificial Sequence
  Synthetic
ccgttttttttttttaagcccaa

SEQ ID NO: 10470 - DNA, 23 bp, Artificial Sequence
  Synthetic
ccgttttttttttttccggctgc

SEQ ID NO: 10471 - DNA, 23 bp, Artificial Sequence
  Synthetic
ccgttttttttttttaccctcca

SEQ ID NO: 10472 - DNA, 23 bp, Artificial Sequence
  Synthetic
ccgttttttttttttactgatat

SEQ ID NO: 10473 - DNA, 23 bp, Artificial Sequence
  Synthetic
ccgttttttttttttacctaata

SEQ ID NO: 10474 - DNA, 23 bp, Artificial Sequence
  Synthetic
ccgttttttttttttagctgctt

SEQ ID NO: 10475 - DNA, 23 bp, Artificial Sequence
  Synthetic
ccgttttttttttttgtcaattc

SEQ ID NO: 10476 - DNA, 23 bp, Artificial Sequence
  Synthetic
ccgttttttttttttctgggact

SEQ ID NO: 10477 - DNA, 23 bp, Artificial Sequence
  Synthetic
ccgttttttttttttccacatgg

SEQ ID NO: 10478 - DNA, 23 bp, Artificial Sequence
  Synthetic
ccgttttttttttttgccaatat

SEQ ID NO: 10479 - DNA, 23 bp, Artificial Sequence
  Synthetic
ccgttttttttttttccaacaac

SEQ ID NO: 10480 - DNA, 23 bp, Artificial Sequence
  Synthetic
ccgttttttttttttccaacaac

SEQ ID NO: 10481 - DNA, 23 bp, Artificial Sequence
  Synthetic
ccgttttttttttttgaacaggt

SEQ ID NO: 10482 - DNA, 23 bp, Artificial Sequence
  Synthetic
ccgttttttttttttaaccaatg

SEQ ID NO: 10483 - DNA, 23 bp, Artificial Sequence
  Synthetic
ccgttttttttttttgaacaggt

SEQ ID NO: 10484 - DNA, 23 bp, Artificial Sequence
  Synthetic
ccgttttttttttttcagttttg

SEQ ID NO: 10485 - DNA, 23 bp, Artificial Sequence
  Synthetic
ccgttttttttttttcagttttg

SEQ ID NO: 10486 - DNA, 23 bp, Artificial Sequence
  Synthetic
ccgttttttttttttacatcgtt

SEQ ID NO: 10487 - DNA, 23 bp, Artificial Sequence
  Synthetic
ccgttttttttttttgtcatcat

SEQ ID NO: 10488 - DNA, 23 bp, Artificial Sequence
  Synthetic
ccgttttttttttttccatcatt

SEQ ID NO: 10489 - DNA, 23 bp, Artificial Sequence
  Synthetic
ccgttttttttttttagaacaat

SEQ ID NO: 10490 - DNA, 23 bp, Artificial Sequence
  Synthetic
ccgttttttttttttcttcccat

SEQ ID NO: 10491 - DNA, 23 bp, Artificial Sequence
  Synthetic
ccgttttttttttttctagtggt

SEQ ID NO: 10492 - DNA, 23 bp, Artificial Sequence
  Synthetic
ccgttttttttttttcaggcata

SEQ ID NO: 10493 - DNA, 23 bp, Artificial Sequence
  Synthetic
ccgttttttttttttcagactcc

SEQ ID NO: 10494 - DNA, 23 bp, Artificial Sequence
  Synthetic
ccgttttttttttttccacacac

SEQ ID NO: 10495 - DNA, 23 bp, Artificial Sequence
  Synthetic
ccgttttttttttttgagggagg

SEQ ID NO: 10496 - DNA, 23 bp, Artificial Sequence
  Synthetic
ccgttttttttttttacaagctt

SEQ ID NO: 10497 - DNA, 23 bp, Artificial Sequence
  Synthetic
ccgttttttttttttctacctgc

SEQ ID NO: 10498 - DNA, 23 bp, Artificial Sequence
  Synthetic
ccgttttttttttttacctgcac

SEQ ID NO: 10499 - DNA, 23 bp, Artificial Sequence
  Synthetic
ccgttttttttttttcaacatca

SEQ ID NO: 10500 - DNA, 23 bp, Artificial Sequence
  Synthetic
ccgttttttttttttcagccgct

SEQ ID NO: 10501 - DNA, 23 bp, Artificial Sequence
  Synthetic
ccgttttttttttttaggcaaag

SEQ ID NO: 10502 - DNA, 23 bp, Artificial Sequence
  Synthetic
ccgttttttttttttggccgtga

SEQ ID NO: 10503 - DNA, 23 bp, Artificial Sequence
  Synthetic
ccgttttttttttttctgcctgt

SEQ ID NO: 10504 - DNA, 23 bp, Artificial Sequence
  Synthetic
ccgttttttttttttgtctgtca

SEQ ID NO: 10505 - DNA, 23 bp, Artificial Sequence
  Synthetic
ccgttttttttttttcacagttg

SEQ ID NO: 10506 - DNA, 23 bp, Artificial Sequence
  Synthetic
ccgttttttttttttcacatttg

SEQ ID NO: 10507 - DNA, 23 bp, Artificial Sequence
  Synthetic
ccgttttttttttttatccagtc

SEQ ID NO: 10508 - DNA, 23 bp, Artificial Sequence
  Synthetic
ccgttttttttttttacatggtt

SEQ ID NO: 10509 - DNA, 23 bp, Artificial Sequence
  Synthetic
ccgttttttttttttagaattgc

SEQ ID NO: 10510 - DNA, 23 bp, Artificial Sequence
  Synthetic
ccgttttttttttttacagttct

SEQ ID NO: 10511 - DNA, 23 bp, Artificial Sequence
  Synthetic
ccgttttttttttttaaacccag

SEQ ID NO: 10512 - DNA, 23 bp, Artificial Sequence
  Synthetic
ccgttttttttttttgagaccca

SEQ ID NO: 10513 - DNA, 23 bp, Artificial Sequence
  Synthetic
ccgttttttttttttggggtatt

SEQ ID NO: 10514 - DNA, 23 bp, Artificial Sequence
  Synthetic
ccgttttttttttttaaacggaa

SEQ ID NO: 10515 - DNA, 23 bp, Artificial Sequence
  Synthetic
ccgttttttttttttggaaatcc

SEQ ID NO: 10516 - DNA, 23 bp, Artificial Sequence
  Synthetic
ccgttttttttttttggtaatcc

SEQ ID NO: 10517 - DNA, 23 bp, Artificial Sequence
  Synthetic
ccgttttttttttttctgttcct

SEQ ID NO: 10518 - DNA, 23 bp, Artificial Sequence
  Synthetic
ccgttttttttttttcagaccga

SEQ ID NO: 10519 - DNA, 23 bp, Artificial Sequence
  Synthetic
ccgttttttttttttgcctatcc

SEQ ID NO: 10520 - DNA, 23 bp, Artificial Sequence
  Synthetic
ccgttttttttttttaacctatc

SEQ ID NO: 10521 - DNA, 23 bp, Artificial Sequence
  Synthetic
ccgttttttttttttgcggaact

SEQ ID NO: 10522 - DNA, 23 bp, Artificial Sequence
  Synthetic
ccgttttttttttttgcagaact

SEQ ID NO: 10523 - DNA, 23 bp, Artificial Sequence
  Synthetic
ccgttttttttttttctcaatag

SEQ ID NO: 10524 - DNA, 23 bp, Artificial Sequence
  Synthetic
ccgttttttttttttaaaaagtg

SEQ ID NO: 10525 - DNA, 23 bp, Artificial Sequence
  Synthetic
ccgttttttttttttggcacaca

SEQ ID NO: 10526 - DNA, 23 bp, Artificial Sequence
  Synthetic
ccgttttttttttttagagaggg

SEQ ID NO: 10527 - DNA, 23 bp, Artificial Sequence
  Synthetic
ccgttttttttttttgacaaaca

SEQ ID NO: 10528 - DNA, 23 bp, Artificial Sequence
  Synthetic
ccgttttttttttttgagagggc

SEQ ID NO: 10529 - DNA, 23 bp, Artificial Sequence
  Synthetic
ccgttttttttttttacactcaa

SEQ ID NO: 10530 - DNA, 23 bp, Artificial Sequence
  Synthetic
ccgttttttttttttcaaaagag

SEQ ID NO: 10531 - DNA, 23 bp, Artificial Sequence
  Synthetic
ccgttttttttttttacactaca

SEQ ID NO: 10532 - DNA, 23 bp, Artificial Sequence
  Synthetic
ccgttttttttttttacacacaa

SEQ ID NO: 10533 - DNA, 23 bp, Artificial Sequence
  Synthetic
ccgttttttttttttagactcaa

SEQ ID NO: 10534 - DNA, 23 bp, Artificial Sequence
  Synthetic
ccgttttttttttttacaggatt

SEQ ID NO: 10535 - DNA, 23 bp, Artificial Sequence
  Synthetic
ccgttttttttttttcatgcaca

SEQ ID NO: 10536 - DNA, 23 bp, Artificial Sequence
  Synthetic
ccgttttttttttttacatgttc

SEQ ID NO: 10537 - DNA, 23 bp, Artificial Sequence
  Synthetic
ccgttttttttttttggaagaac

SEQ ID NO: 10538 - DNA, 23 bp, Artificial Sequence
  Synthetic
ccgttttttttttttatgtatgt

SEQ ID NO: 10539 - DNA, 23 bp, Artificial Sequence
  Synthetic
ccgttttttttttttaaccgatt

SEQ ID NO: 10540 - DNA, 23 bp, Artificial Sequence
  Synthetic
ccgttttttttttttaacactga

SEQ ID NO: 10541 - DNA, 23 bp, Artificial Sequence
  Synthetic
ccgttttttttttttaccgattt

SEQ ID NO: 10542 - DNA, 23 bp, Artificial Sequence
  Synthetic
ccgttttttttttttgaagagag

SEQ ID NO: 10543 - DNA, 23 bp, Artificial Sequence
  Synthetic
ccgttttttttttttgctttgac

SEQ ID NO: 10544 - DNA, 23 bp, Artificial Sequence
  Synthetic
ccgttttttttttttgctttgac

SEQ ID NO: 10545 - DNA, 23 bp, Artificial Sequence
  Synthetic
ccgttttttttttttcaccaaaa

SEQ ID NO: 10546 - DNA, 23 bp, Artificial Sequence
  Synthetic
ccgttttttttttttctactaaa

SEQ ID NO: 10547 - DNA, 23 bp, Artificial Sequence
  Synthetic
ccgttttttttttttagaaagca

SEQ ID NO: 10548 - DNA, 23 bp, Artificial Sequence
  Synthetic
ccgttttttttttttccactgaa

SEQ ID NO: 10549 - DNA, 23 bp, Artificial Sequence
  Synthetic
ccgttttttttttttcagcaggt

SEQ ID NO: 10550 - DNA, 23 bp, Artificial Sequence
  Synthetic
ccgttttttttttttacactcaa

SEQ ID NO: 10551 - DNA, 23 bp, Artificial Sequence
  Synthetic
ccgttttttttttttgctgcaaa

SEQ ID NO: 10552 - DNA, 23 bp, Artificial Sequence
  Synthetic
ccgttttttttttttcttccagt

SEQ ID NO: 10553 - DNA, 23 bp, Artificial Sequence
  Synthetic
ccgttttttttttttagctgagt

SEQ ID NO: 10554 - DNA, 23 bp, Artificial Sequence
  Synthetic
ccgttttttttttttgctgagag

SEQ ID NO: 10555 - DNA, 23 bp, Artificial Sequence
  Synthetic
ccgttttttttttttcttccagt

SEQ ID NO: 10556 - DNA, 23 bp, Artificial Sequence
  Synthetic
ccgttttttttttttccagtcaa

SEQ ID NO: 10557 - DNA, 23 bp, Artificial Sequence
  Synthetic
ccgttttttttttttctgtaaac

SEQ ID NO: 10558 - DNA, 23 bp, Artificial Sequence
  Synthetic
ccgttttttttttttcagctatg

SEQ ID NO: 10559 - DNA, 23 bp, Artificial Sequence
  Synthetic
ccgttttttttttttgcaactta

SEQ ID NO: 10560 - DNA, 23 bp, Artificial Sequence
  Synthetic
ccgttttttttttttcgccctct

SEQ ID NO: 10561 - DNA, 23 bp, Artificial Sequence
  Synthetic
ccgttttttttttttgttgcagc

SEQ ID NO: 10562 - DNA, 23 bp, Artificial Sequence
  Synthetic
ccgttttttttttttagaggtcg

SEQ ID NO: 10563 - DNA, 23 bp, Artificial Sequence
  Synthetic
ccgttttttttttttccagcagc

SEQ ID NO: 10564 - DNA, 23 bp, Artificial Sequence
  Synthetic
ccgttttttttttttcaccaatg

SEQ ID NO: 10565 - DNA, 23 bp, Artificial Sequence
  Synthetic
ccgttttttttttttacacttac

SEQ ID NO: 10566 - DNA, 23 bp, Artificial Sequence
  Synthetic
ccgttttttttttttactggagg

SEQ ID NO: 10567 - DNA, 23 bp, Artificial Sequence
  Synthetic
ccgttttttttttttacggaagg

SEQ ID NO: 10568 - DNA, 23 bp, Artificial Sequence
  Synthetic
ccgttttttttttttaaaaaggt

SEQ ID NO: 10569 - DNA, 23 bp, Artificial Sequence
  Synthetic
ccgttttttttttttcaatgcaa

SEQ ID NO: 10570 - DNA, 23 bp, Artificial Sequence
  Synthetic
ccgttttttttttttctctgcag

SEQ ID NO: 10571 - DNA, 23 bp, Artificial Sequence
  Synthetic
ccgttttttttttttctaggata

SEQ ID NO: 10572 - DNA, 23 bp, Artificial Sequence
  Synthetic
ccgttttttttttttacattttt

SEQ ID NO: 10573 - DNA, 23 bp, Artificial Sequence
  Synthetic
ccgttttttttttttaaaggcat

SEQ ID NO: 10574 - DNA, 23 bp, Artificial Sequence
  Synthetic
ccgttttttttttttcaacaaaa

SEQ ID NO: 10575 - DNA, 23 bp, Artificial Sequence
  Synthetic
ccgttttttttttttgagctcct

SEQ ID NO: 10576 - DNA, 23 bp, Artificial Sequence
  Synthetic
ccgttttttttttttggctataa

SEQ ID NO: 10577 - DNA, 23 bp, Artificial Sequence
  Synthetic
ccgttttttttttttactgaccg

SEQ ID NO: 10578 - DNA, 23 bp, Artificial Sequence
  Synthetic
ccgttttttttttttgacgggtg

SEQ ID NO: 10579 - DNA, 23 bp, Artificial Sequence
  Synthetic
ccgttttttttttttacagtcag

SEQ ID NO: 10580 - DNA, 23 bp, Artificial Sequence
  Synthetic
ccgttttttttttttgcactgga

SEQ ID NO: 10581 - DNA, 23 bp, Artificial Sequence
  Synthetic
ccgttttttttttttagaggcag

SEQ ID NO: 10582 - DNA, 23 bp, Artificial Sequence
  Synthetic
ccgttttttttttttaacaacca

SEQ ID NO: 10583 - DNA, 23 bp, Artificial Sequence
  Synthetic
ccgttttttttttttcaatcagc

SEQ ID NO: 10584 - DNA, 23 bp, Artificial Sequence
  Synthetic
ccgttttttttttttgcaatcag

SEQ ID NO: 10585 - DNA, 23 bp, Artificial Sequence
  Synthetic
ccgttttttttttttgaaagtgt

SEQ ID NO: 10586 - DNA, 23 bp, Artificial Sequence
  Synthetic
ccgttttttttttttcaggctca

SEQ ID NO: 10587 - DNA, 23 bp, Artificial Sequence
  Synthetic
ccgttttttttttttgtacccct

SEQ ID NO: 10588 - DNA, 23 bp, Artificial Sequence
  Synthetic
ccgttttttttttttcacaccta

SEQ ID NO: 10589 - DNA, 23 bp, Artificial Sequence
  Synthetic
ccgttttttttttttacagatgg

SEQ ID NO: 10590 - DNA, 23 bp, Artificial Sequence
  Synthetic
ccgttttttttttttataaggat

SEQ ID NO: 10591 - DNA, 23 bp, Artificial Sequence
  Synthetic
ccgttttttttttttcaccattg

SEQ ID NO: 10592 - DNA, 23 bp, Artificial Sequence
  Synthetic
ccgttttttttttttaagatcaa

SEQ ID NO: 10593 - DNA, 23 bp, Artificial Sequence
  Synthetic
ccgttttttttttttcgaatata

SEQ ID NO: 10594 - DNA, 23 bp, Artificial Sequence
  Synthetic
ccgttttttttttttaaccaggt

SEQ ID NO: 10595 - DNA, 23 bp, Artificial Sequence
  Synthetic
ccgttttttttttttctcggaca

SEQ ID NO: 10596 - DNA, 23 bp, Artificial Sequence
  Synthetic
ccgttttttttttttcacttagc

SEQ ID NO: 10597 - DNA, 23 bp, Artificial Sequence
  Synthetic
ccgttttttttttttcacgcgag

SEQ ID NO: 10598 - DNA, 23 bp, Artificial Sequence
  Synthetic
ccgttttttttttttacgtggat

SEQ ID NO: 10599 - DNA, 23 bp, Artificial Sequence
  Synthetic
ccgttttttttttttctcataga

SEQ ID NO: 10600 - DNA, 23 bp, Artificial Sequence
  Synthetic
ccgttttttttttttaaagtgga

SEQ ID NO: 10601 - DNA, 23 bp, Artificial Sequence
  Synthetic
ccgttttttttttttaaccatag

SEQ ID NO: 10602 - DNA, 23 bp, Artificial Sequence
  Synthetic
ccgttttttttttttcgtgaaat

SEQ ID NO: 10603 - DNA, 23 bp, Artificial Sequence
  Synthetic
ccgttttttttttttacaaaagt

SEQ ID NO: 10604 - DNA, 23 bp, Artificial Sequence
  Synthetic
ccgttttttttttttacacagga

SEQ ID NO: 10605 - DNA, 23 bp, Artificial Sequence
  Synthetic
ccgttttttttttttcctacgtt

SEQ ID NO: 10606 - DNA, 23 bp, Artificial Sequence
  Synthetic
ccgttttttttttttaagatgtg

SEQ ID NO: 10607 - DNA, 23 bp, Artificial Sequence
  Synthetic
ccgttttttttttttgcgcatgt

SEQ ID NO: 10608 - DNA, 23 bp, Artificial Sequence
  Synthetic
ccgttttttttttttacagagag

SEQ ID NO: 10609 - DNA, 23 bp, Artificial Sequence
  Synthetic
ccgttttttttttttcgaatcca

SEQ ID NO: 10610 - DNA, 23 bp, Artificial Sequence
  Synthetic
ccgttttttttttttagccacag

SEQ ID NO: 10611 - DNA, 23 bp, Artificial Sequence
  Synthetic
ccgttttttttttttgtgaacaa

SEQ ID NO: 10612 - DNA, 23 bp, Artificial Sequence
  Synthetic
ccgttttttttttttaaggggtt

SEQ ID NO: 10613 - DNA, 23 bp, Artificial Sequence
  Synthetic
ccgttttttttttttaacaggcc

SEQ ID NO: 10614 - DNA, 23 bp, Artificial Sequence
  Synthetic
ccgttttttttttttactgaggg

SEQ ID NO: 10615 - DNA, 23 bp, Artificial Sequence
  Synthetic
ccgttttttttttttacggctag

SEQ ID NO: 10616 - DNA, 23 bp, Artificial Sequence
  Synthetic
ccgttttttttttttggccttct

SEQ ID NO: 10617 - DNA, 23 bp, Artificial Sequence
  Synthetic
ccgttttttttttttctgagggg

SEQ ID NO: 10618 - DNA, 23 bp, Artificial Sequence
  Synthetic
ccgttttttttttttccaaaaca

SEQ ID NO: 10619 - DNA, 23 bp, Artificial Sequence
  Synthetic
ccgttttttttttttggcggaca

SEQ ID NO: 10620 - DNA, 23 bp, Artificial Sequence
  Synthetic
ccgttttttttttttacggcatt

SEQ ID NO: 10621 - DNA, 23 bp, Artificial Sequence
  Synthetic
ccgttttttttttttcctgcatg

SEQ ID NO: 10622 - DNA, 23 bp, Artificial Sequence
  Synthetic
ccgttttttttttttacaccgag

SEQ ID NO: 10623 - DNA, 23 bp, Artificial Sequence
  Synthetic
ccgttttttttttttgaataatg

SEQ ID NO: 10624 - DNA, 23 bp, Artificial Sequence
  Synthetic
ccgttttttttttttggagtcga

SEQ ID NO: 10625 - DNA, 23 bp, Artificial Sequence
  Synthetic
ccgttttttttttttggttcaaa

SEQ ID NO: 10626 - DNA, 23 bp, Artificial Sequence
  Synthetic
ccgttttttttttttatgggaca

SEQ ID NO: 10627 - DNA, 23 bp, Artificial Sequence
  Synthetic
ccgttttttttttttaccagcta

SEQ ID NO: 10628 - DNA, 23 bp, Artificial Sequence
  Synthetic
ccgttttttttttttccagctag

SEQ ID NO: 10629 - DNA, 23 bp, Artificial Sequence
  Synthetic
ccgttttttttttttattaggaa

SEQ ID NO: 10630 - DNA, 23 bp, Artificial Sequence
  Synthetic
ccgttttttttttttattcagga

SEQ ID NO: 10631 - DNA, 23 bp, Artificial Sequence
  Synthetic
ccgttttttttttttatgcatgc

SEQ ID NO: 10632 - DNA, 23 bp, Artificial Sequence
  Synthetic
ccgttttttttttttaactcagt

SEQ ID NO: 10633 - DNA, 23 bp, Artificial Sequence
  Synthetic
ccgttttttttttttgtctcagt

SEQ ID NO: 10634 - DNA, 23 bp, Artificial Sequence
  Synthetic
ccgttttttttttttagtgtata

SEQ ID NO: 10635 - DNA, 23 bp, Artificial Sequence
  Synthetic
ccgttttttttttttcgatgtag

SEQ ID NO: 10636 - DNA, 23 bp, Artificial Sequence
  Synthetic
ccgttttttttttttgatggaca

SEQ ID NO: 10637 - DNA, 23 bp, Artificial Sequence
  Synthetic
ccgttttttttttttatctcaca

SEQ ID NO: 10638 - DNA, 23 bp, Artificial Sequence
  Synthetic
ccgttttttttttttcacatcag

SEQ ID NO: 10639 - DNA, 23 bp, Artificial Sequence
  Synthetic
ccgttttttttttttgtcttatg

SEQ ID NO: 10640 - DNA, 23 bp, Artificial Sequence
  Synthetic
ccgttttttttttttcatataca

SEQ ID NO: 10641 - DNA, 23 bp, Artificial Sequence
  Synthetic
ccgttttttttttttgtgtaggt

SEQ ID NO: 10642 - DNA, 23 bp, Artificial Sequence
  Synthetic
ccgttttttttttttgtgttggt

SEQ ID NO: 10643 - DNA, 23 bp, Artificial Sequence
  Synthetic
ccgttttttttttttcagacaca

SEQ ID NO: 10644 - DNA, 23 bp, Artificial Sequence
  Synthetic
ccgttttttttttttggacacca

SEQ ID NO: 10645 - DNA, 23 bp, Artificial Sequence
  Synthetic
ccgttttttttttttcaccagtg

SEQ ID NO: 10646 - DNA, 23 bp, Artificial Sequence
  Synthetic
ccgttttttttttttgtgaaaag

SEQ ID NO: 10647 - DNA, 23 bp, Artificial Sequence
  Synthetic
ccgttttttttttttacaagacg

SEQ ID NO: 10648 - DNA, 23 bp, Artificial Sequence
  Synthetic
ccgttttttttttttatcgggag

SEQ ID NO: 10649 - DNA, 23 bp, Artificial Sequence
  Synthetic
ccgttttttttttttgagaggag

SEQ ID NO: 10650 - DNA, 23 bp, Artificial Sequence
  Synthetic
ccgttttttttttttgaattcat

SEQ ID NO: 10651 - DNA, 23 bp, Artificial Sequence
  Synthetic
ccgttttttttttttctcggggc

SEQ ID NO: 10652 - DNA, 23 bp, Artificial Sequence
  Synthetic
ccgttttttttttttagtggatg

SEQ ID NO: 10653 - DNA, 23 bp, Artificial Sequence
  Synthetic
ccgttttttttttttgagagtgc

SEQ ID NO: 10654 - DNA, 23 bp, Artificial Sequence
  Synthetic
ccgttttttttttttgaccaaga

SEQ ID NO: 10655 - DNA, 23 bp, Artificial Sequence
  Synthetic
ccgttttttttttttgctgccat

SEQ ID NO: 10656 - DNA, 23 bp, Artificial Sequence
  Synthetic
ccgttttttttttttcagcatgg

SEQ ID NO: 10657 - DNA, 23 bp, Artificial Sequence
  Synthetic
ccgttttttttttttcctcatgg

SEQ ID NO: 10658 - DNA, 23 bp, Artificial Sequence
  Synthetic
ccgttttttttttttaggtttcc

SEQ ID NO: 10659 - DNA, 23 bp, Artificial Sequence
  Synthetic
ccgttttttttttttaagaagtg

SEQ ID NO: 10660 - DNA, 23 bp, Artificial Sequence
  Synthetic
ccgttttttttttttgagattgg

SEQ ID NO: 10661 - DNA, 23 bp, Artificial Sequence
  Synthetic
ccgttttttttttttacaaacca

SEQ ID NO: 10662 - DNA, 23 bp, Artificial Sequence
  Synthetic
ccgttttttttttttaaacatca

SEQ ID NO: 10663 - DNA, 23 bp, Artificial Sequence
  Synthetic
ccgttttttttttttctgaaccc

SEQ ID NO: 10664 - DNA, 23 bp, Artificial Sequence
  Synthetic
ccgttttttttttttcacccagg

SEQ ID NO: 10665 - DNA, 23 bp, Artificial Sequence
  Synthetic
ccgttttttttttttcaaatcct

SEQ ID NO: 10666 - DNA, 23 bp, Artificial Sequence
  Synthetic
ccgttttttttttttgcagtact

SEQ ID NO: 10667 - DNA, 23 bp, Artificial Sequence
  Synthetic
ccgttttttttttttagaaaacc

SEQ ID NO: 10668 - DNA, 23 bp, Artificial Sequence
  Synthetic
ccgttttttttttttacggtcct

SEQ ID NO: 10669 - DNA, 23 bp, Artificial Sequence
  Synthetic
ccgttttttttttttacacacca

SEQ ID NO: 10670 - DNA, 23 bp, Artificial Sequence
  Synthetic
ccgttttttttttttccaggatc

SEQ ID NO: 10671 - DNA, 23 bp, Artificial Sequence
  Synthetic
ccgttttttttttttgtgaccaa

SEQ ID NO: 10672 - DNA, 23 bp, Artificial Sequence
  Synthetic
ccgttttttttttttcagttatc

SEQ ID NO: 10673 - DNA, 23 bp, Artificial Sequence
  Synthetic
ccgttttttttttttcgtgacat

SEQ ID NO: 10674 - DNA, 23 bp, Artificial Sequence
  Synthetic
ccgttttttttttttagaagtgc

SEQ ID NO: 10675 - DNA, 23 bp, Artificial Sequence
  Synthetic
ccgttttttttttttgactccgt

SEQ ID NO: 10676 - DNA, 23 bp, Artificial Sequence
  Synthetic
ccgttttttttttttcactcaaa

SEQ ID NO: 10677 - DNA, 23 bp, Artificial Sequence
  Synthetic
ccgttttttttttttcactgaaa

SEQ ID NO: 10678 - DNA, 23 bp, Artificial Sequence
  Synthetic
ccgttttttttttttacatcatc

SEQ ID NO: 10679 - DNA, 23 bp, Artificial Sequence
  Synthetic
ccgttttttttttttaagaggga

SEQ ID NO: 10680 - DNA, 23 bp, Artificial Sequence
  Synthetic
ccgttttttttttttgcacaacc

SEQ ID NO: 10681 - DNA, 23 bp, Artificial Sequence
  Synthetic
ccgttttttttttttaagggacc

SEQ ID NO: 10682 - DNA, 23 bp, Artificial Sequence
  Synthetic
ccgttttttttttttggctctca

SEQ ID NO: 10683 - DNA, 23 bp, Artificial Sequence
  Synthetic
ccgttttttttttttcttgggct

SEQ ID NO: 10684 - DNA, 23 bp, Artificial Sequence
  Synthetic
ccgttttttttttttggtagtgg

SEQ ID NO: 10685 - DNA, 23 bp, Artificial Sequence
  Synthetic
ccgttttttttttttacatgaac

SEQ ID NO: 10686 - DNA, 23 bp, Artificial Sequence
  Synthetic
ccgttttttttttttacatgcac

SEQ ID NO: 10687 - DNA, 23 bp, Artificial Sequence
  Synthetic
ccgttttttttttttacacacat

SEQ ID NO: 10688 - DNA, 23 bp, Artificial Sequence
  Synthetic
ccgttttttttttttcaccacat

SEQ ID NO: 10689 - DNA, 23 bp, Artificial Sequence
  Synthetic
ccgttttttttttttcctccagc

SEQ ID NO: 10690 - DNA, 23 bp, Artificial Sequence
  Synthetic
ccgttttttttttttcacacaca

SEQ ID NO: 10691 - DNA, 23 bp, Artificial Sequence
  Synthetic
ccgttttttttttttctccaagg

SEQ ID NO: 10692 - DNA, 23 bp, Artificial Sequence
  Synthetic
ccgttttttttttttacaccact

SEQ ID NO: 10693 - DNA, 23 bp, Artificial Sequence
  Synthetic
ccgttttttttttttgttctgag

SEQ ID NO: 10694 - DNA, 23 bp, Artificial Sequence
  Synthetic
ccgttttttttttttactgagcg

SEQ ID NO: 10695 - DNA, 23 bp, Artificial Sequence
  Synthetic
ccgttttttttttttactgtggg

SEQ ID NO: 10696 - DNA, 23 bp, Artificial Sequence
  Synthetic
ccgttttttttttttagctcaac

SEQ ID NO: 10697 - DNA, 23 bp, Artificial Sequence
  Synthetic
ccgttttttttttttgcaagtcc

SEQ ID NO: 10698 - DNA, 23 bp, Artificial Sequence
  Synthetic
ccgttttttttttttcagaagct

SEQ ID NO: 10699 - DNA, 23 bp, Artificial Sequence
  Synthetic
ccgttttttttttttcctccagt

SEQ ID NO: 10700 - DNA, 23 bp, Artificial Sequence
  Synthetic
ccgttttttttttttaccaagag

SEQ ID NO: 10701 - DNA, 23 bp, Artificial Sequence
  Synthetic
ccgttttttttttttcccccatg

SEQ ID NO: 10702 - DNA, 23 bp, Artificial Sequence
  Synthetic
ccgttttttttttttagctgcct

SEQ ID NO: 10703 - DNA, 23 bp, Artificial Sequence
  Synthetic
ccgttttttttttttcagacttc

SEQ ID NO: 10704 - DNA, 23 bp, Artificial Sequence
  Synthetic
ccgttttttttttttgaggacac

SEQ ID NO: 10705 - DNA, 23 bp, Artificial Sequence
  Synthetic
ccgttttttttttttgacttgaa

SEQ ID NO: 10706 - DNA, 23 bp, Artificial Sequence
  Synthetic
ccgttttttttttttgtgcctca

SEQ ID NO: 10707 - DNA, 23 bp, Artificial Sequence
  Synthetic
ccgttttttttttttcttcaccg

SEQ ID NO: 10708 - DNA, 23 bp, Artificial Sequence
  Synthetic
ccgttttttttttttcattgctg

SEQ ID NO: 10709 - DNA, 23 bp, Artificial Sequence
  Synthetic
ccgttttttttttttgaataagt

SEQ ID NO: 10710 - DNA, 23 bp, Artificial Sequence
  Synthetic
ccgttttttttttttggaccccg

SEQ ID NO: 10711 - DNA, 23 bp, Artificial Sequence
  Synthetic
ccgttttttttttttggttgtga

SEQ ID NO: 10712 - DNA, 23 bp, Artificial Sequence
  Synthetic
ccgttttttttttttctgcctct

SEQ ID NO: 10713 - DNA, 23 bp, Artificial Sequence
  Synthetic
ccgttttttttttttgagtgagg

SEQ ID NO: 10714 - DNA, 23 bp, Artificial Sequence
  Synthetic
ccgttttttttttttacagccac

SEQ ID NO: 10715 - DNA, 23 bp, Artificial Sequence
  Synthetic
ccgttttttttttttgaaaactt

SEQ ID NO: 10716 - DNA, 23 bp, Artificial Sequence
  Synthetic
ccgttttttttttttcttcaggc

SEQ ID NO: 10717 - DNA, 23 bp, Artificial Sequence
  Synthetic
ccgttttttttttttcagtcacc

SEQ ID NO: 10718 - DNA, 23 bp, Artificial Sequence
  Synthetic
ccgttttttttttttcccacagc

SEQ ID NO: 10719 - DNA, 23 bp, Artificial Sequence
  Synthetic
ccgttttttttttttctccacag

SEQ ID NO: 10720 - DNA, 23 bp, Artificial Sequence
  Synthetic
ccgttttttttttttagggaagg

SEQ ID NO: 10721 - DNA, 23 bp, Artificial Sequence
  Synthetic
ccgttttttttttttcgagccag

SEQ ID NO: 10722 - DNA, 23 bp, Artificial Sequence
  Synthetic
ccgttttttttttttcaacaaaa

SEQ ID NO: 10723 - DNA, 23 bp, Artificial Sequence
  Synthetic
ccgttttttttttttggtggact

SEQ ID NO: 10724 - DNA, 23 bp, Artificial Sequence
  Synthetic
ccgttttttttttttccatctat

SEQ ID NO: 10725 - DNA, 23 bp, Artificial Sequence
  Synthetic
ccgttttttttttttgagcgggg

SEQ ID NO: 10726 - DNA, 23 bp, Artificial Sequence
  Synthetic
ccgttttttttttttctttcctt

SEQ ID NO: 10727 - DNA, 23 bp, Artificial Sequence
  Synthetic
ccgttttttttttttctaggagc

SEQ ID NO: 10728 - DNA, 23 bp, Artificial Sequence
  Synthetic
ccgttttttttttttgcccaccc

SEQ ID NO: 10729 - DNA, 23 bp, Artificial Sequence
  Synthetic
ccgttttttttttttgagacagg

SEQ ID NO: 10730 - DNA, 23 bp, Artificial Sequence
  Synthetic
ccgttttttttttttcgtaggca

SEQ ID NO: 10731 - DNA, 23 bp, Artificial Sequence
  Synthetic
ccgttttttttttttagaagctc

SEQ ID NO: 10732 - DNA, 23 bp, Artificial Sequence
  Synthetic
ccgttttttttttttcctcctgc

SEQ ID NO: 10733 - DNA, 23 bp, Artificial Sequence
  Synthetic
ccgttttttttttttctcaactc

SEQ ID NO: 10734 - DNA, 23 bp, Artificial Sequence
  Synthetic
ccgttttttttttttcttacatc

SEQ ID NO: 10735 - DNA, 23 bp, Artificial Sequence
  Synthetic
ccgttttttttttttggtaccgc

SEQ ID NO: 10736 - DNA, 23 bp, Artificial Sequence
  Synthetic
ccgttttttttttttcaacaccc

SEQ ID NO: 10737 - DNA, 23 bp, Artificial Sequence
  Synthetic
ccgttttttttttttgctgtgtg

SEQ ID NO: 10738 - DNA, 23 bp, Artificial Sequence
  Synthetic
ccgttttttttttttgcgaccga

SEQ ID NO: 10739 - DNA, 23 bp, Artificial Sequence
  Synthetic
ccgttttttttttttcacgcggg

SEQ ID NO: 10740 - DNA, 23 bp, Artificial Sequence
  Synthetic
ccgttttttttttttagagaagg

SEQ ID NO: 10741 - DNA, 23 bp, Artificial Sequence
  Synthetic
ccgttttttttttttcgacaccc

SEQ ID NO: 10742 - DNA, 23 bp, Artificial Sequence
  Synthetic
ccgttttttttttttaacatttt

SEQ ID NO: 10743 - DNA, 23 bp, Artificial Sequence
  Synthetic
ccgttttttttttttggaggccc

SEQ ID NO: 10744 - DNA, 23 bp, Artificial Sequence
  Synthetic
ccgttttttttttttcccccttt

SEQ ID NO: 10745 - DNA, 23 bp, Artificial Sequence
  Synthetic
ccgttttttttttttgctgttag

SEQ ID NO: 10746 - DNA, 23 bp, Artificial Sequence
  Synthetic
ccgttttttttttttagtggacc

SEQ ID NO: 10747 - DNA, 23 bp, Artificial Sequence
  Synthetic
ccgttttttttttttgtcaaaat

SEQ ID NO: 10748 - DNA, 23 bp, Artificial Sequence
  Synthetic
ccgttttttttttttctccccac

SEQ ID NO: 10749 - DNA, 23 bp, Artificial Sequence
  Synthetic
ccgttttttttttttgtgtcagt

SEQ ID NO: 10750 - DNA, 23 bp, Artificial Sequence
  Synthetic
ccgttttttttttttgctctgtc

SEQ ID NO: 10751 - DNA, 23 bp, Artificial Sequence
  Synthetic
ccgttttttttttttgccactgg

SEQ ID NO: 10752 - DNA, 23 bp, Artificial Sequence
  Synthetic
ccgttttttttttttacagttgc

SEQ ID NO: 10753 - DNA, 23 bp, Artificial Sequence
  Synthetic
ccgttttttttttttaggaggac

SEQ ID NO: 10754 - DNA, 23 bp, Artificial Sequence
  Synthetic
ccgttttttttttttccagctcc

SEQ ID NO: 10755 - DNA, 23 bp, Artificial Sequence
  Synthetic
ccgttttttttttttaacaaaat

SEQ ID NO: 10756 - DNA, 23 bp, Artificial Sequence
  Synthetic
ccgttttttttttttgtcgattc

SEQ ID NO: 10757 - DNA, 23 bp, Artificial Sequence
  Synthetic
ccgttttttttttttaaggatga

SEQ ID NO: 10758 - DNA, 23 bp, Artificial Sequence
  Synthetic
ccgttttttttttttccaggtga

SEQ ID NO: 10759 - DNA, 23 bp, Artificial Sequence
  Synthetic
ccgttttttttttttccctatgt

SEQ ID NO: 10760 - DNA, 23 bp, Artificial Sequence
  Synthetic
ccgttttttttttttcatacagc

SEQ ID NO: 10761 - DNA, 23 bp, Artificial Sequence
  Synthetic
ccgttttttttttttactttcgg

SEQ ID NO: 10762 - DNA, 23 bp, Artificial Sequence
  Synthetic
ccgttttttttttttcaggccgg

SEQ ID NO: 10763 - DNA, 23 bp, Artificial Sequence
  Synthetic
ccgttttttttttttctacctgc

SEQ ID NO: 10764 - DNA, 23 bp, Artificial Sequence
  Synthetic
ccgttttttttttttagcaaaaa

SEQ ID NO: 10765 - DNA, 23 bp, Artificial Sequence
  Synthetic
ccgttttttttttttaacaatac

SEQ ID NO: 10766 - DNA, 23 bp, Artificial Sequence
  Synthetic
ccgttttttttttttacaagatc

SEQ ID NO: 10767 - DNA, 23 bp, Artificial Sequence
  Synthetic
ccgttttttttttttcgcaaggt

SEQ ID NO: 10768 - DNA, 23 bp, Artificial Sequence
  Synthetic
ccgttttttttttttcttcagtt

SEQ ID NO: 10769 - DNA, 23 bp, Artificial Sequence
  Synthetic
ccgttttttttttttcatagccc

SEQ ID NO: 10770 - DNA, 23 bp, Artificial Sequence
  Synthetic
ccgttttttttttttacaggagt

SEQ ID NO: 10771 - DNA, 23 bp, Artificial Sequence
  Synthetic
ccgttttttttttttgctacctg

SEQ ID NO: 10772 - DNA, 23 bp, Artificial Sequence
  Synthetic
ccgttttttttttttatctgcac

SEQ ID NO: 10773 - DNA, 23 bp, Artificial Sequence
  Synthetic
ccgttttttttttttgatagccc

SEQ ID NO: 10774 - DNA, 23 bp, Artificial Sequence
  Synthetic
ccgttttttttttttacaaattc

SEQ ID NO: 10775 - DNA, 23 bp, Artificial Sequence
  Synthetic
ccgttttttttttttcacaagtt

SEQ ID NO: 10776 - DNA, 23 bp, Artificial Sequence
  Synthetic
ccgttttttttttttagccaagc

SEQ ID NO: 10777 - DNA, 23 bp, Artificial Sequence
  Synthetic
ccgttttttttttttgccctttt

SEQ ID NO: 10778 - DNA, 23 bp, Artificial Sequence
  Synthetic
ccgttttttttttttacagctgg

SEQ ID NO: 10779 - DNA, 23 bp, Artificial Sequence
  Synthetic
ccgttttttttttttccctctgg

SEQ ID NO: 10780 - DNA, 23 bp, Artificial Sequence
  Synthetic
ccgttttttttttttctaccata

SEQ ID NO: 10781 - DNA, 23 bp, Artificial Sequence
  Synthetic
ccgttttttttttttctagtaca

SEQ ID NO: 10782 - DNA, 23 bp, Artificial Sequence
  Synthetic
ccgttttttttttttaagggatt

SEQ ID NO: 10783 - DNA, 23 bp, Artificial Sequence
  Synthetic
ccgttttttttttttgcagaagc

SEQ ID NO: 10784 - DNA, 23 bp, Artificial Sequence
  Synthetic
ccgttttttttttttcacttttg

SEQ ID NO: 10785 - DNA, 23 bp, Artificial Sequence
  Synthetic
ccgttttttttttttcgaaggca

SEQ ID NO: 10786 - DNA, 23 bp, Artificial Sequence
  Synthetic
ccgttttttttttttcacaaacc

SEQ ID NO: 10787 - DNA, 23 bp, Artificial Sequence
  Synthetic
ccgttttttttttttgtaaacca

SEQ ID NO: 10788 - DNA, 23 bp, Artificial Sequence
  Synthetic
ccgttttttttttttcgccaata

SEQ ID NO: 10789 - DNA, 23 bp, Artificial Sequence
  Synthetic
ccgttttttttttttacaagtgc

SEQ ID NO: 10790 - DNA, 23 bp, Artificial Sequence
  Synthetic
ccgttttttttttttactacctg

SEQ ID NO: 10791 - DNA, 23 bp, Artificial Sequence
  Synthetic
ccgttttttttttttatctgcac

SEQ ID NO: 10792 - DNA, 23 bp, Artificial Sequence
  Synthetic
ccgttttttttttttactcaccg

SEQ ID NO: 10793 - DNA, 23 bp, Artificial Sequence
  Synthetic
ccgttttttttttttggtacaat

SEQ ID NO: 10794 - DNA, 23 bp, Artificial Sequence
  Synthetic
ccgttttttttttttaacccacc

SEQ ID NO: 10795 - DNA, 23 bp, Artificial Sequence
  Synthetic
ccgttttttttttttcagtgaat

SEQ ID NO: 10796 - DNA, 23 bp, Artificial Sequence
  Synthetic
ccgttttttttttttacccttat

SEQ ID NO: 10797 - DNA, 23 bp, Artificial Sequence
  Synthetic
ccgttttttttttttcggctgca

SEQ ID NO: 10798 - DNA, 23 bp, Artificial Sequence
  Synthetic
ccgttttttttttttaccctcca

SEQ ID NO: 10799 - DNA, 23 bp, Artificial Sequence
  Synthetic
ccgttttttttttttactgatat

SEQ ID NO: 10800 - DNA, 23 bp, Artificial Sequence
  Synthetic
ccgttttttttttttccacatgg

SEQ ID NO: 10801 - DNA, 23 bp, Artificial Sequence
  Synthetic
ccgttttttttttttgccgggtg

SEQ ID NO: 10802 - DNA, 23 bp, Artificial Sequence
  Synthetic
ccgttttttttttttcctatttc

SEQ ID NO: 10803 - DNA, 23 bp, Artificial Sequence
  Synthetic
ccgttttttttttttgaacaggt

SEQ ID NO: 10804 - DNA, 23 bp, Artificial Sequence
  Synthetic
ccgttttttttttttcagttttg

SEQ ID NO: 10805 - DNA, 23 bp, Artificial Sequence
  Synthetic
ccgttttttttttttcagttttg

SEQ ID NO: 10806 - DNA, 23 bp, Artificial Sequence
  Synthetic
ccgttttttttttttacctgcac

SEQ ID NO: 10807 - DNA, 23 bp, Artificial Sequence
  Synthetic
ccgttttttttttttaggcatag

SEQ ID NO: 10808 - DNA, 23 bp, Artificial Sequence
  Synthetic
ccgttttttttttttcagactcc

SEQ ID NO: 10809 - DNA, 23 bp, Artificial Sequence
  Synthetic
ccgttttttttttttccacacac

SEQ ID NO: 10810 - DNA, 23 bp, Artificial Sequence
  Synthetic
ccgttttttttttttcaacatca

SEQ ID NO: 10811 - DNA, 23 bp, Artificial Sequence
  Synthetic
ccgttttttttttttaggcgaag

SEQ ID NO: 10812 - DNA, 23 bp, Artificial Sequence
  Synthetic
ccgttttttttttttctgcctgt

SEQ ID NO: 10813 - DNA, 23 bp, Artificial Sequence
  Synthetic
ccgttttttttttttgtctgtca

SEQ ID NO: 10814 - DNA, 23 bp, Artificial Sequence
  Synthetic
ccgttttttttttttacatggtt

SEQ ID NO: 10815 - DNA, 23 bp, Artificial Sequence
  Synthetic
ccgttttttttttttacagttct

SEQ ID NO: 10816 - DNA, 23 bp, Artificial Sequence
  Synthetic
ccgttttttttttttaaagtgtc

SEQ ID NO: 10817 - DNA, 23 bp, Artificial Sequence
  Synthetic
ccgttttttttttttaaacggaa

SEQ ID NO: 10818 - DNA, 23 bp, Artificial Sequence
  Synthetic
ccgttttttttttttggaaatcc

SEQ ID NO: 10819 - DNA, 23 bp, Artificial Sequence
  Synthetic
ccgttttttttttttctgttcct

SEQ ID NO: 10820 - DNA, 23 bp, Artificial Sequence
  Synthetic
ccgttttttttttttcagaccga

SEQ ID NO: 10821 - DNA, 23 bp, Artificial Sequence
  Synthetic
ccgttttttttttttagcctatc

SEQ ID NO: 10822 - DNA, 23 bp, Artificial Sequence
  Synthetic
ccgttttttttttttggcggaac

SEQ ID NO: 10823 - DNA, 23 bp, Artificial Sequence
  Synthetic
ccgttttttttttttctcaatag

SEQ ID NO: 10824 - DNA, 23 bp, Artificial Sequence
  Synthetic
ccgttttttttttttaaccgatt

SEQ ID NO: 10825 - DNA, 23 bp, Artificial Sequence
  Synthetic
ccgttttttttttttactgattt

SEQ ID NO: 10826 - DNA, 23 bp, Artificial Sequence
  Synthetic
ccgttttttttttttgctgagtg

SEQ ID NO: 10827 - DNA, 23 bp, Artificial Sequence
  Synthetic
ccgttttttttttttgctgagag

SEQ ID NO: 10828 - DNA, 23 bp, Artificial Sequence
  Synthetic
ccgttttttttttttcttccagt

SEQ ID NO: 10829 - DNA, 23 bp, Artificial Sequence
  Synthetic
ccgttttttttttttcagctatg

SEQ ID NO: 10830 - DNA, 23 bp, Artificial Sequence
  Synthetic
ccgttttttttttttgcaactta

SEQ ID NO: 10831 - DNA, 23 bp, Artificial Sequence
  Synthetic
ccgttttttttttttcaatgcaa

SEQ ID NO: 10832 - DNA, 23 bp, Artificial Sequence
  Synthetic
ccgttttttttttttacaaccag

SEQ ID NO: 10833 - DNA, 23 bp, Artificial Sequence
  Synthetic
ccgttttttttttttaacaaaat

SEQ ID NO: 10834 - DNA, 23 bp, Artificial Sequence
  Synthetic
ccgttttttttttttcatacagc

SEQ ID NO: 10835 - DNA, 23 bp, Artificial Sequence
  Synthetic
ccgttttttttttttacaggccg

SEQ ID NO: 10836 - DNA, 23 bp, Artificial Sequence
  Synthetic
ccgttttttttttttctacctgc

SEQ ID NO: 10837 - DNA, 23 bp, Artificial Sequence
  Synthetic
ccgttttttttttttgcaaaaat

SEQ ID NO: 10838 - DNA, 23 bp, Artificial Sequence
  Synthetic
ccgttttttttttttcacaagat

SEQ ID NO: 10839 - DNA, 23 bp, Artificial Sequence
  Synthetic
ccgttttttttttttgtgctctc

SEQ ID NO: 10840 - DNA, 23 bp, Artificial Sequence
  Synthetic
ccgttttttttttttggcataca

SEQ ID NO: 10841 - DNA, 23 bp, Artificial Sequence
  Synthetic
ccgttttttttttttctggatgc

SEQ ID NO: 10842 - DNA, 23 bp, Artificial Sequence
  Synthetic
ccgttttttttttttggggaatg

SEQ ID NO: 10843 - DNA, 23 bp, Artificial Sequence
  Synthetic
ccgttttttttttttcggcaagt

SEQ ID NO: 10844 - DNA, 23 bp, Artificial Sequence
  Synthetic
ccgttttttttttttcggcaagt

SEQ ID NO: 10845 - DNA, 23 bp, Artificial Sequence
  Synthetic
ccgttttttttttttgatattgg

SEQ ID NO: 10846 - DNA, 23 bp, Artificial Sequence
  Synthetic
ccgttttttttttttgggagctc

SEQ ID NO: 10847 - DNA, 23 bp, Artificial Sequence
  Synthetic
ccgttttttttttttgatcaatg

SEQ ID NO: 10848 - DNA, 23 bp, Artificial Sequence
  Synthetic
ccgttttttttttttgagttccc

SEQ ID NO: 10849 - DNA, 23 bp, Artificial Sequence
  Synthetic
ccgttttttttttttgagttccc

SEQ ID NO: 10850 - DNA, 23 bp, Artificial Sequence
  Synthetic
ccgttttttttttttgagttccc

SEQ ID NO: 10851 - DNA, 23 bp, Artificial Sequence
  Synthetic
ccgttttttttttttgagttccc

SEQ ID NO: 10852 - DNA, 23 bp, Artificial Sequence
  Synthetic
ccgttttttttttttgagttccc

SEQ ID NO: 10853 - DNA, 23 bp, Artificial Sequence
  Synthetic
ccgttttttttttttgagttccc

SEQ ID NO: 10854 - DNA, 23 bp, Artificial Sequence
  Synthetic
ccgttttttttttttgagttccc

SEQ ID NO: 10855 - DNA, 23 bp, Artificial Sequence
  Synthetic
ccgttttttttttttaagttccc

SEQ ID NO: 10856 - DNA, 23 bp, Artificial Sequence
  Synthetic
ccgttttttttttttgagttccc

SEQ ID NO: 10857 - DNA, 23 bp, Artificial Sequence
  Synthetic
ccgttttttttttttgagttccc

SEQ ID NO: 10858 - DNA, 23 bp, Artificial Sequence
  Synthetic
ccgttttttttttttgagttccc

SEQ ID NO: 10859 - DNA, 23 bp, Artificial Sequence
  Synthetic
ccgttttttttttttgagttccc

SEQ ID NO: 10860 - DNA, 23 bp, Artificial Sequence
  Synthetic
ccgttttttttttttgagttccc

SEQ ID NO: 10861 - DNA, 23 bp, Artificial Sequence
  Synthetic
ccgttttttttttttgagttccc

SEQ ID NO: 10862 - DNA, 23 bp, Artificial Sequence
  Synthetic
ccgttttttttttttgagttccc

SEQ ID NO: 10863 - DNA, 23 bp, Artificial Sequence
  Synthetic
ccgttttttttttttgagttccc

SEQ ID NO: 10864 - DNA, 23 bp, Artificial Sequence
  Synthetic
ccgttttttttttttctgggcaa

SEQ ID NO: 10865 - DNA, 23 bp, Artificial Sequence
  Synthetic
ccgttttttttttttcagggcag

SEQ ID NO: 10866 - DNA, 23 bp, Artificial Sequence
  Synthetic
ccgttttttttttttcagggcaa

SEQ ID NO: 10867 - DNA, 23 bp, Artificial Sequence
  Synthetic
ccgttttttttttttagggcagc

SEQ ID NO: 10868 - DNA, 23 bp, Artificial Sequence
  Synthetic
ccgttttttttttttctgggcaa

SEQ ID NO: 10869 - DNA, 23 bp, Artificial Sequence
  Synthetic
ccgttttttttttttagccaagc

SEQ ID NO: 10870 - DNA, 23 bp, Artificial Sequence
  Synthetic
ccgttttttttttttccatcatc

SEQ ID NO: 10871 - DNA, 23 bp, Artificial Sequence
  Synthetic
ccgttttttttttttcctgcatg

SEQ ID NO: 10872 - DNA, 23 bp, Artificial Sequence
  Synthetic
ccgttttttttttttccacccaa

SEQ ID NO: 10873 - DNA, 23 bp, Artificial Sequence
  Synthetic
ccgttttttttttttgtgctcac

SEQ ID NO: 10874 - DNA, 23 bp, Artificial Sequence
  Synthetic
ccgttttttttttttgtgctcac

SEQ ID NO: 10875 - DNA, 23 bp, Artificial Sequence
  Synthetic
ccgttttttttttttgtgctcac

SEQ ID NO: 10876 - DNA, 23 bp, Artificial Sequence
  Synthetic
ccgttttttttttttgtgctcac

SEQ ID NO: 10877 - DNA, 23 bp, Artificial Sequence
  Synthetic
ccgttttttttttttgtgctcac

SEQ ID NO: 10878 - DNA, 23 bp, Artificial Sequence
  Synthetic
ccgttttttttttttgtgctcac

SEQ ID NO: 10879 - DNA, 23 bp, Artificial Sequence
  Synthetic
ccgttttttttttttgtgctcac

SEQ ID NO: 10880 - DNA, 23 bp, Artificial Sequence
  Synthetic
ccgttttttttttttgtgctcac

SEQ ID NO: 10881 - DNA, 23 bp, Artificial Sequence
  Synthetic
ccgttttttttttttgtgctcac

SEQ ID NO: 10882 - DNA, 23 bp, Artificial Sequence
  Synthetic
ccgttttttttttttgtgctcac

SEQ ID NO: 10883 - DNA, 23 bp, Artificial Sequence
  Synthetic
ccgttttttttttttgtgctctc

SEQ ID NO: 10884 - DNA, 23 bp, Artificial Sequence
  Synthetic
ccgttttttttttttatgctcac

SEQ ID NO: 10885 - DNA, 23 bp, Artificial Sequence
  Synthetic
ccgttttttttttttcagagctc

SEQ ID NO: 10886 - DNA, 23 bp, Artificial Sequence
  Synthetic
ccgttttttttttttcagagctc

SEQ ID NO: 10887 - DNA, 23 bp, Artificial Sequence
  Synthetic
ccgttttttttttttggagctcc

SEQ ID NO: 10888 - DNA, 23 bp, Artificial Sequence
  Synthetic
ccgttttttttttttcggagctc

SEQ ID NO: 10889 - DNA, 23 bp, Artificial Sequence
  Synthetic
ccgttttttttttttaggagctc

SEQ ID NO: 10890 - DNA, 23 bp, Artificial Sequence
  Synthetic
ccgttttttttttttagagctcc

SEQ ID NO: 10891 - DNA, 23 bp, Artificial Sequence
  Synthetic
ccgttttttttttttggcataca

SEQ ID NO: 10892 - DNA, 23 bp, Artificial Sequence
  Synthetic
ccgttttttttttttggcataca

SEQ ID NO: 10893 - DNA, 23 bp, Artificial Sequence
  Synthetic
ccgttttttttttttggcataca

SEQ ID NO: 10894 - DNA, 23 bp, Artificial Sequence
  Synthetic
ccgttttttttttttggcataca

SEQ ID NO: 10895 - DNA, 23 bp, Artificial Sequence
  Synthetic
ccgttttttttttttcggcatac

SEQ ID NO: 10896 - DNA, 23 bp, Artificial Sequence
  Synthetic
ccgttttttttttttggcattca

SEQ ID NO: 10897 - DNA, 23 bp, Artificial Sequence
  Synthetic
ccgttttttttttttctggatgc

SEQ ID NO: 10898 - DNA, 23 bp, Artificial Sequence
  Synthetic
ccgttttttttttttctggatgc

SEQ ID NO: 10899 - DNA, 23 bp, Artificial Sequence
  Synthetic
ccgttttttttttttgcacgtgc

SEQ ID NO: 10900 - DNA, 23 bp, Artificial Sequence
  Synthetic
ccgttttttttttttgcacgtgc

SEQ ID NO: 10901 - DNA, 23 bp, Artificial Sequence
  Synthetic
ccgttttttttttttgcacgtac

SEQ ID NO: 10902 - DNA, 23 bp, Artificial Sequence
  Synthetic
ccgttttttttttttagcacgtg

SEQ ID NO: 10903 - DNA, 23 bp, Artificial Sequence
  Synthetic
ccgttttttttttttctcacgtg

SEQ ID NO: 10904 - DNA, 23 bp, Artificial Sequence
  Synthetic
ccgttttttttttttgcacgtgc

SEQ ID NO: 10905 - DNA, 23 bp, Artificial Sequence
  Synthetic
ccgttttttttttttggggaatg

SEQ ID NO: 10906 - DNA, 23 bp, Artificial Sequence
  Synthetic
ccgttttttttttttggggaatg

SEQ ID NO: 10907 - DNA, 23 bp, Artificial Sequence
  Synthetic
ccgttttttttttttggggaatg

SEQ ID NO: 10908 - DNA, 23 bp, Artificial Sequence
  Synthetic
ccgttttttttttttggggaatg

SEQ ID NO: 10909 - DNA, 23 bp, Artificial Sequence
  Synthetic
ccgttttttttttttggggaatg

SEQ ID NO: 10910 - DNA, 23 bp, Artificial Sequence
  Synthetic
ccgttttttttttttggggaatg

SEQ ID NO: 10911 - DNA, 23 bp, Artificial Sequence
  Synthetic
ccgttttttttttttgaggaatg

SEQ ID NO: 10912 - DNA, 23 bp, Artificial Sequence
  Synthetic
ccgttttttttttttgaggaatg

SEQ ID NO: 10913 - DNA, 23 bp, Artificial Sequence
  Synthetic
ccgttttttttttttgaggaatg

SEQ ID NO: 10914 - DNA, 23 bp, Artificial Sequence
  Synthetic
ccgttttttttttttgaggaatg

SEQ ID NO: 10915 - DNA, 23 bp, Artificial Sequence
  Synthetic
ccgttttttttttttagggattg

SEQ ID NO: 10916 - DNA, 23 bp, Artificial Sequence
  Synthetic
ccgttttttttttttagggattg

SEQ ID NO: 10917 - DNA, 23 bp, Artificial Sequence
  Synthetic
ccgttttttttttttagggaatg

SEQ ID NO: 10918 - DNA, 23 bp, Artificial Sequence
  Synthetic
ccgttttttttttttggggaatg

SEQ ID NO: 10919 - DNA, 23 bp, Artificial Sequence
  Synthetic
ccgttttttttttttagatcatg

SEQ ID NO: 10920 - DNA, 23 bp, Artificial Sequence
  Synthetic
ccgttttttttttttagatcatg

SEQ ID NO: 10921 - DNA, 23 bp, Artificial Sequence
  Synthetic
ccgttttttttttttagatcatg

SEQ ID NO: 10922 - DNA, 23 bp, Artificial Sequence
  Synthetic
ccgttttttttttttcagatcat

SEQ ID NO: 10923 - DNA, 23 bp, Artificial Sequence
  Synthetic
ccgttttttttttttcagatcat

SEQ ID NO: 10924 - DNA, 23 bp, Artificial Sequence
  Synthetic
ccgttttttttttttcagatcat

SEQ ID NO: 10925 - DNA, 23 bp, Artificial Sequence
  Synthetic
ccgttttttttttttcagatcat

SEQ ID NO: 10926 - DNA, 23 bp, Artificial Sequence
  Synthetic
ccgttttttttttttcagatcat

SEQ ID NO: 10927 - DNA, 23 bp, Artificial Sequence
  Synthetic
ccgttttttttttttcagatcat

SEQ ID NO: 10928 - DNA, 23 bp, Artificial Sequence
  Synthetic
ccgttttttttttttcagatcat

SEQ ID NO: 10929 - DNA, 23 bp, Artificial Sequence
  Synthetic
ccgttttttttttttgtcccgat

SEQ ID NO: 10930 - DNA, 23 bp, Artificial Sequence
  Synthetic
ccgttttttttttttcccgagct

SEQ ID NO: 10931 - DNA, 23 bp, Artificial Sequence
  Synthetic
ccgttttttttttttcggcaagt

SEQ ID NO: 10932 - DNA, 23 bp, Artificial Sequence
  Synthetic
ccgttttttttttttccggcaag

SEQ ID NO: 10933 - DNA, 23 bp, Artificial Sequence
  Synthetic
ccgttttttttttttccggcaag

SEQ ID NO: 10934 - DNA, 23 bp, Artificial Sequence
  Synthetic
ccgttttttttttttccggcaat

SEQ ID NO: 10935 - DNA, 23 bp, Artificial Sequence
  Synthetic
ccgttttttttttttccggcaag

SEQ ID NO: 10936 - DNA, 23 bp, Artificial Sequence
  Synthetic
ccgttttttttttttaggcaagt

SEQ ID NO: 10937 - DNA, 23 bp, Artificial Sequence
  Synthetic
ccgttttttttttttaggcaagt

SEQ ID NO: 10938 - DNA, 23 bp, Artificial Sequence
  Synthetic
ccgttttttttttttcaggcaag

SEQ ID NO: 10939 - DNA, 23 bp, Artificial Sequence
  Synthetic
ccgttttttttttttcaggcaag

SEQ ID NO: 10940 - DNA, 23 bp, Artificial Sequence
  Synthetic
ccgttttttttttttcaggcaag

SEQ ID NO: 10941 - DNA, 23 bp, Artificial Sequence
  Synthetic
ccgttttttttttttcaggcaag

SEQ ID NO: 10942 - DNA, 23 bp, Artificial Sequence
  Synthetic
ccgttttttttttttcaggcaag

SEQ ID NO: 10943 - DNA, 23 bp, Artificial Sequence
  Synthetic
ccgttttttttttttcaggcaag

SEQ ID NO: 10944 - DNA, 23 bp, Artificial Sequence
  Synthetic
ccgttttttttttttaggcaagt

SEQ ID NO: 10945 - DNA, 23 bp, Artificial Sequence
  Synthetic
ccgttttttttttttaggcaagt

SEQ ID NO: 10946 - DNA, 23 bp, Artificial Sequence
  Synthetic
ccgttttttttttttccggcaag

SEQ ID NO: 10947 - DNA, 23 bp, Artificial Sequence
  Synthetic
ccgttttttttttttcatgggca

SEQ ID NO: 10948 - DNA, 23 bp, Artificial Sequence
  Synthetic
ccgttttttttttttgatattgg

SEQ ID NO: 10949 - DNA, 23 bp, Artificial Sequence
  Synthetic
ccgttttttttttttgatattgg

SEQ ID NO: 10950 - DNA, 23 bp, Artificial Sequence
  Synthetic
ccgttttttttttttgatattgg

SEQ ID NO: 10951 - DNA, 23 bp, Artificial Sequence
  Synthetic
ccgttttttttttttgatattgg

SEQ ID NO: 10952 - DNA, 23 bp, Artificial Sequence
  Synthetic
ccgttttttttttttgatattgg

SEQ ID NO: 10953 - DNA, 23 bp, Artificial Sequence
  Synthetic
ccgttttttttttttgatattgg

SEQ ID NO: 10954 - DNA, 23 bp, Artificial Sequence
  Synthetic
ccgttttttttttttgatattgg

SEQ ID NO: 10955 - DNA, 23 bp, Artificial Sequence
  Synthetic
ccgttttttttttttagtgatat

SEQ ID NO: 10956 - DNA, 23 bp, Artificial Sequence
  Synthetic
ccgttttttttttttgatattga

SEQ ID NO: 10957 - DNA, 23 bp, Artificial Sequence
  Synthetic
ccgttttttttttttatgcagca

SEQ ID NO: 10958 - DNA, 23 bp, Artificial Sequence
  Synthetic
ccgttttttttttttatgcagca

SEQ ID NO: 10959 - DNA, 23 bp, Artificial Sequence
  Synthetic
ccgttttttttttttgtgcagca

SEQ ID NO: 10960 - DNA, 23 bp, Artificial Sequence
  Synthetic
ccgttttttttttttatgcagca

SEQ ID NO: 10961 - DNA, 23 bp, Artificial Sequence
  Synthetic
ccgttttttttttttgggagcac

SEQ ID NO: 10962 - DNA, 23 bp, Artificial Sequence
  Synthetic
ccgttttttttttttgggagcac

SEQ ID NO: 10963 - DNA, 23 bp, Artificial Sequence
  Synthetic
ccgttttttttttttggcgctat

SEQ ID NO: 10964 - DNA, 23 bp, Artificial Sequence
  Synthetic
ccgttttttttttttgatcaatg

SEQ ID NO: 10965 - DNA, 23 bp, Artificial Sequence
  Synthetic
ccgttttttttttttagatcaat

SEQ ID NO: 10966 - DNA, 23 bp, Artificial Sequence
  Synthetic
ccgttttttttttttggaggtgg

SEQ ID NO: 10967 - DNA, 23 bp, Artificial Sequence
  Synthetic
ccgttttttttttttgagttccc

SEQ ID NO: 10968 - DNA, 23 bp, Artificial Sequence
  Synthetic
ccgttttttttttttgagttccc

SEQ ID NO: 10969 - DNA, 23 bp, Artificial Sequence
  Synthetic
ccgttttttttttttgagttcct

SEQ ID NO: 10970 - DNA, 23 bp, Artificial Sequence
  Synthetic
ccgttttttttttttgagttccc

SEQ ID NO: 10971 - DNA, 23 bp, Artificial Sequence
  Synthetic
ccgttttttttttttgagttccc

SEQ ID NO: 10972 - DNA, 23 bp, Artificial Sequence
  Synthetic
ccgttttttttttttgagttccc

SEQ ID NO: 10973 - DNA, 23 bp, Artificial Sequence
  Synthetic
ccgttttttttttttgagttccc

SEQ ID NO: 10974 - DNA, 23 bp, Artificial Sequence
  Synthetic
ccgttttttttttttgagttccc

SEQ ID NO: 10975 - DNA, 23 bp, Artificial Sequence
  Synthetic
ccgttttttttttttgagttccc

SEQ ID NO: 10976 - DNA, 23 bp, Artificial Sequence
  Synthetic
ccgttttttttttttgagttccc

SEQ ID NO: 10977 - DNA, 23 bp, Artificial Sequence
  Synthetic
ccgttttttttttttgagttccc

SEQ ID NO: 10978 - DNA, 23 bp, Artificial Sequence
  Synthetic
ccgttttttttttttgagttccc

SEQ ID NO: 10979 - DNA, 23 bp, Artificial Sequence
  Synthetic
ccgttttttttttttgagttccc

SEQ ID NO: 10980 - DNA, 23 bp, Artificial Sequence
  Synthetic
ccgttttttttttttgagttccc

SEQ ID NO: 10981 - DNA, 23 bp, Artificial Sequence
  Synthetic
ccgttttttttttttgagttcct

SEQ ID NO: 10982 - DNA, 23 bp, Artificial Sequence
  Synthetic
ccgttttttttttttgagttccc

SEQ ID NO: 10983 - DNA, 23 bp, Artificial Sequence
  Synthetic
ccgttttttttttttgagttccc

SEQ ID NO: 10984 - DNA, 23 bp, Artificial Sequence
  Synthetic
ccgttttttttttttgagttccc

SEQ ID NO: 10985 - DNA, 23 bp, Artificial Sequence
  Synthetic
ccgttttttttttttgagttccc

SEQ ID NO: 10986 - DNA, 23 bp, Artificial Sequence
  Synthetic
ccgttttttttttttgagtttcc

SEQ ID NO: 10987 - DNA, 23 bp, Artificial Sequence
  Synthetic
ccgttttttttttttgatttccc

SEQ ID NO: 10988 - DNA, 23 bp, Artificial Sequence
  Synthetic
ccgttttttttttttgagttccg

SEQ ID NO: 10989 - DNA, 23 bp, Artificial Sequence
  Synthetic
ccgttttttttttttgagaatcc

SEQ ID NO: 10990 - DNA, 23 bp, Artificial Sequence
  Synthetic
ccgttttttttttttcagttcaa

SEQ ID NO: 10991 - DNA, 23 bp, Artificial Sequence
  Synthetic
ccgttttttttttttcagttcaa

SEQ ID NO: 10992 - DNA, 23 bp, Artificial Sequence
  Synthetic
ccgttttttttttttaagttcaa

SEQ ID NO: 10993 - DNA, 23 bp, Artificial Sequence
  Synthetic
ccgttttttttttttcagttcaa

SEQ ID NO: 10994 - DNA, 23 bp, Artificial Sequence
  Synthetic
ccgttttttttttttcagttcaa

SEQ ID NO: 10995 - DNA, 23 bp, Artificial Sequence
  Synthetic
ccgttttttttttttcatcaacg

SEQ ID NO: 10996 - DNA, 23 bp, Artificial Sequence
  Synthetic
ccgttttttttttttcatcaacg

SEQ ID NO: 10997 - DNA, 23 bp, Artificial Sequence
  Synthetic
ccgttttttttttttaaggggtg

SEQ ID NO: 10998 - DNA, 23 bp, Artificial Sequence
  Synthetic
ccgttttttttttttcaggggcg

SEQ ID NO: 10999 - DNA, 23 bp, Artificial Sequence
  Synthetic
ccgttttttttttttcagggcaa

SEQ ID NO: 11000 - DNA, 23 bp, Artificial Sequence
  Synthetic
ccgttttttttttttcagggcaa

SEQ ID NO: 11001 - DNA, 23 bp, Artificial Sequence
  Synthetic
ccgttttttttttttcagggcaa

SEQ ID NO: 11002 - DNA, 23 bp, Artificial Sequence
  Synthetic
ccgttttttttttttcagggcaa

SEQ ID NO: 11003 - DNA, 23 bp, Artificial Sequence
  Synthetic
ccgttttttttttttctgggcaa

SEQ ID NO: 11004 - DNA, 23 bp, Artificial Sequence
  Synthetic
ccgttttttttttttctgggcaa

SEQ ID NO: 11005 - DNA, 23 bp, Artificial Sequence
  Synthetic
ccgttttttttttttctgggcaa

SEQ ID NO: 11006 - DNA, 23 bp, Artificial Sequence
  Synthetic
ccgttttttttttttctgggcaa

SEQ ID NO: 11007 - DNA, 23 bp, Artificial Sequence
  Synthetic
ccgttttttttttttcagggcag

SEQ ID NO: 11008 - DNA, 23 bp, Artificial Sequence
  Synthetic
ccgttttttttttttagggcaac

SEQ ID NO: 11009 - DNA, 23 bp, Artificial Sequence
  Synthetic
ccgttttttttttttcggggcaa

SEQ ID NO: 11010 - DNA, 23 bp, Artificial Sequence
  Synthetic
ccgttttttttttttgccaggga

SEQ ID NO: 11011 - DNA, 23 bp, Artificial Sequence
  Synthetic
ccgttttttttttttgtgcagaa

SEQ ID NO: 11012 - DNA, 23 bp, Artificial Sequence
  Synthetic
ccgttttttttttttggacgatg

SEQ ID NO: 11013 - DNA, 23 bp, Artificial Sequence
  Synthetic
ccgttttttttttttctgctctg

SEQ ID NO: 11014 - DNA, 23 bp, Artificial Sequence
  Synthetic
ccgttttttttttttgaacagtg

SEQ ID NO: 11015 - DNA, 23 bp, Artificial Sequence
  Synthetic
ccgttttttttttttggaacaaa

SEQ ID NO: 11016 - DNA, 23 bp, Artificial Sequence
  Synthetic
ccgttttttttttttcgtcattt

SEQ ID NO: 11017 - DNA, 23 bp, Artificial Sequence
  Synthetic
ccgttttttttttttcaacatcg

SEQ ID NO: 11018 - DNA, 23 bp, Artificial Sequence
  Synthetic
ccgttttttttttttatcatttc

SEQ ID NO: 11019 - DNA, 23 bp, Artificial Sequence
  Synthetic
ccgttttttttttttcgtaagga

SEQ ID NO: 11020 - DNA, 23 bp, Artificial Sequence
  Synthetic
ccgttttttttttttcaactcca

SEQ ID NO: 11021 - DNA, 23 bp, Artificial Sequence
  Synthetic
ccgttttttttttttaagtcaaa

SEQ ID NO: 11022 - DNA, 23 bp, Artificial Sequence
  Synthetic
ccgttttttttttttcactataa

SEQ ID NO: 11023 - DNA, 23 bp, Artificial Sequence
  Synthetic
ccgttttttttttttcgaacaac

SEQ ID NO: 11024 - DNA, 23 bp, Artificial Sequence
  Synthetic
ccgttttttttttttcgaacaac

SEQ ID NO: 11025 - DNA, 23 bp, Artificial Sequence
  Synthetic
ccgttttttttttttcgaacaac

SEQ ID NO: 11026 - DNA, 23 bp, Artificial Sequence
  Synthetic
ccgttttttttttttcgaacaac

SEQ ID NO: 11027 - DNA, 23 bp, Artificial Sequence
  Synthetic
ccgttttttttttttcgaacaac

SEQ ID NO: 11028 - DNA, 23 bp, Artificial Sequence
  Synthetic
ccgttttttttttttcgaacaac

SEQ ID NO: 11029 - DNA, 23 bp, Artificial Sequence
  Synthetic
ccgttttttttttttcgaacaac

SEQ ID NO: 11030 - DNA, 23 bp, Artificial Sequence
  Synthetic
ccgttttttttttttcgaacaac

SEQ ID NO: 11031 - DNA, 23 bp, Artificial Sequence
  Synthetic
ccgttttttttttttcgaacaac

SEQ ID NO: 11032 - DNA, 23 bp, Artificial Sequence
  Synthetic
ccgttttttttttttcgaacaac

SEQ ID NO: 11033 - DNA, 23 bp, Artificial Sequence
  Synthetic
ccgttttttttttttgtcccgat

SEQ ID NO: 11034 - DNA, 23 bp, Artificial Sequence
  Synthetic
ccgttttttttttttcccacatt

SEQ ID NO: 11035 - DNA, 23 bp, Artificial Sequence
  Synthetic
ccgttttttttttttcccacatt

SEQ ID NO: 11036 - DNA, 23 bp, Artificial Sequence
  Synthetic
ccgttttttttttttcccacatt

SEQ ID NO: 11037 - DNA, 23 bp, Artificial Sequence
  Synthetic
ccgttttttttttttattcgtct

SEQ ID NO: 11038 - DNA, 23 bp, Artificial Sequence
  Synthetic
ccgttttttttttttccagattt

SEQ ID NO: 11039 - DNA, 23 bp, Artificial Sequence
  Synthetic
ccgttttttttttttgcagcaag

SEQ ID NO: 11040 - DNA, 23 bp, Artificial Sequence
  Synthetic
ccgttttttttttttatcggatg

SEQ ID NO: 11041 - DNA, 23 bp, Artificial Sequence
  Synthetic
ccgttttttttttttatcggatg

SEQ ID NO: 11042 - DNA, 23 bp, Artificial Sequence
  Synthetic
ccgttttttttttttatcggatg

SEQ ID NO: 11043 - DNA, 23 bp, Artificial Sequence
  Synthetic
ccgttttttttttttatcggatg

SEQ ID NO: 11044 - DNA, 23 bp, Artificial Sequence
  Synthetic
ccgttttttttttttatcggatg

SEQ ID NO: 11045 - DNA, 23 bp, Artificial Sequence
  Synthetic
ccgttttttttttttatcggatg

SEQ ID NO: 11046 - DNA, 23 bp, Artificial Sequence
  Synthetic
ccgttttttttttttatcggatg

SEQ ID NO: 11047 - DNA, 23 bp, Artificial Sequence
  Synthetic
ccgttttttttttttatcggatg

SEQ ID NO: 11048 - DNA, 23 bp, Artificial Sequence
  Synthetic
ccgttttttttttttatcggatg

SEQ ID NO: 11049 - DNA, 23 bp, Artificial Sequence
  Synthetic
ccgttttttttttttccatttcc

SEQ ID NO: 11050 - DNA, 23 bp, Artificial Sequence
  Synthetic
ccgttttttttttttctcctctg

SEQ ID NO: 11051 - DNA, 23 bp, Artificial Sequence
  Synthetic
ccgttttttttttttgaagaaga

SEQ ID NO: 11052 - DNA, 23 bp, Artificial Sequence
  Synthetic
ccgttttttttttttgttgcatc

SEQ ID NO: 11053 - DNA, 23 bp, Artificial Sequence
  Synthetic
ccgttttttttttttatggcggc

SEQ ID NO: 11054 - DNA, 23 bp, Artificial Sequence
  Synthetic
ccgttttttttttttgcgtgctc

SEQ ID NO: 11055 - DNA, 23 bp, Artificial Sequence
  Synthetic
ccgttttttttttttcaccgttg

SEQ ID NO: 11056 - DNA, 23 bp, Artificial Sequence
  Synthetic
ccgttttttttttttcaccgttg

SEQ ID NO: 11057 - DNA, 23 bp, Artificial Sequence
  Synthetic
ccgttttttttttttcaccgttg

SEQ ID NO: 11058 - DNA, 23 bp, Artificial Sequence
  Synthetic
ccgttttttttttttcaccgttg

SEQ ID NO: 11059 - DNA, 23 bp, Artificial Sequence
  Synthetic
ccgttttttttttttcaccgttg

SEQ ID NO: 11060 - DNA, 23 bp, Artificial Sequence
  Synthetic
ccgttttttttttttcaccgttg

SEQ ID NO: 11061 - DNA, 23 bp, Artificial Sequence
  Synthetic
ccgttttttttttttcaccgttg

SEQ ID NO: 11062 - DNA, 23 bp, Artificial Sequence
  Synthetic
ccgttttttttttttcaccgttg

SEQ ID NO: 11063 - DNA, 23 bp, Artificial Sequence
  Synthetic
ccgttttttttttttggattcac

SEQ ID NO: 11064 - DNA, 23 bp, Artificial Sequence
  Synthetic
ccgttttttttttttggattcac

SEQ ID NO: 11065 - DNA, 23 bp, Artificial Sequence
  Synthetic
ccgttttttttttttggattcac

SEQ ID NO: 11066 - DNA, 23 bp, Artificial Sequence
  Synthetic
ccgttttttttttttcttacatt

SEQ ID NO: 11067 - DNA, 23 bp, Artificial Sequence
  Synthetic
ccgttttttttttttattctaac

SEQ ID NO: 11068 - DNA, 23 bp, Artificial Sequence
  Synthetic
ccgttttttttttttattctaac

SEQ ID NO: 11069 - DNA, 23 bp, Artificial Sequence
  Synthetic
ccgttttttttttttattctaac

SEQ ID NO: 11070 - DNA, 23 bp, Artificial Sequence
  Synthetic
ccgttttttttttttattctaac

SEQ ID NO: 11071 - DNA, 23 bp, Artificial Sequence
  Synthetic
ccgttttttttttttattctaac

SEQ ID NO: 11072 - DNA, 23 bp, Artificial Sequence
  Synthetic
ccgttttttttttttattctaac

SEQ ID NO: 11073 - DNA, 23 bp, Artificial Sequence
  Synthetic
ccgttttttttttttattctaac

SEQ ID NO: 11074 - DNA, 23 bp, Artificial Sequence
  Synthetic
ccgttttttttttttattctaac

SEQ ID NO: 11075 - DNA, 23 bp, Artificial Sequence
  Synthetic
ccgttttttttttttccacatgt

SEQ ID NO: 11076 - DNA, 23 bp, Artificial Sequence
  Synthetic
ccgttttttttttttacgtccat

SEQ ID NO: 11077 - DNA, 23 bp, Artificial Sequence
  Synthetic
ccgttttttttttttacgtccat

SEQ ID NO: 11078 - DNA, 23 bp, Artificial Sequence
  Synthetic
ccgttttttttttttacgtccat

SEQ ID NO: 11079 - DNA, 23 bp, Artificial Sequence
  Synthetic
ccgttttttttttttgtccaacg

SEQ ID NO: 11080 - DNA, 23 bp, Artificial Sequence
  Synthetic
ccgttttttttttttgtccaacg

SEQ ID NO: 11081 - DNA, 23 bp, Artificial Sequence
  Synthetic
ccgttttttttttttgtccaacg

SEQ ID NO: 11082 - DNA, 23 bp, Artificial Sequence
  Synthetic
ccgttttttttttttgtccaacg

SEQ ID NO: 11083 - DNA, 23 bp, Artificial Sequence
  Synthetic
ccgttttttttttttgtccaacg

SEQ ID NO: 11084 - DNA, 23 bp, Artificial Sequence
  Synthetic
ccgttttttttttttggtaaaac

SEQ ID NO: 11085 - DNA, 23 bp, Artificial Sequence
  Synthetic
ccgttttttttttttagattcgt

SEQ ID NO: 11086 - DNA, 23 bp, Artificial Sequence
  Synthetic
ccgttttttttttttagattcgt

SEQ ID NO: 11087 - DNA, 23 bp, Artificial Sequence
  Synthetic
ccgttttttttttttagattcgt

SEQ ID NO: 11088 - DNA, 23 bp, Artificial Sequence
  Synthetic
ccgttttttttttttcccaatct

SEQ ID NO: 11089 - DNA, 23 bp, Artificial Sequence
  Synthetic
ccgttttttttttttcccaatct

SEQ ID NO: 11090 - DNA, 23 bp, Artificial Sequence
  Synthetic
ccgttttttttttttcccaatct

SEQ ID NO: 11091 - DNA, 23 bp, Artificial Sequence
  Synthetic
ccgttttttttttttgttgtagt

SEQ ID NO: 11092 - DNA, 23 bp, Artificial Sequence
  Synthetic
ccgttttttttttttcaatcggg

SEQ ID NO: 11093 - DNA, 23 bp, Artificial Sequence
  Synthetic
ccgttttttttttttccgtccca

SEQ ID NO: 11094 - DNA, 23 bp, Artificial Sequence
  Synthetic
ccgttttttttttttccgtccca

SEQ ID NO: 11095 - DNA, 23 bp, Artificial Sequence
  Synthetic
ccgttttttttttttccgtccca

SEQ ID NO: 11096 - DNA, 23 bp, Artificial Sequence
  Synthetic
ccgttttttttttttccgtccca

SEQ ID NO: 11097 - DNA, 23 bp, Artificial Sequence
  Synthetic
ccgttttttttttttccgtccca

SEQ ID NO: 11098 - DNA, 23 bp, Artificial Sequence
  Synthetic
ccgttttttttttttgctagaaa

SEQ ID NO: 11099 - DNA, 23 bp, Artificial Sequence
  Synthetic
ccgttttttttttttgctagaaa

SEQ ID NO: 11100 - DNA, 23 bp, Artificial Sequence
  Synthetic
ccgttttttttttttgctagaaa

SEQ ID NO: 11101 - DNA, 23 bp, Artificial Sequence
  Synthetic
ccgttttttttttttgctagaaa

SEQ ID NO: 11102 - DNA, 23 bp, Artificial Sequence
  Synthetic
ccgttttttttttttgctagaaa

SEQ ID NO: 11103 - DNA, 23 bp, Artificial Sequence
  Synthetic
ccgttttttttttttgctagaaa

SEQ ID NO: 11104 - DNA, 23 bp, Artificial Sequence
  Synthetic
ccgttttttttttttgctagaaa

SEQ ID NO: 11105 - DNA, 23 bp, Artificial Sequence
  Synthetic
ccgttttttttttttgctagaaa

SEQ ID NO: 11106 - DNA, 23 bp, Artificial Sequence
  Synthetic
ccgttttttttttttgctagaaa

SEQ ID NO: 11107 - DNA, 23 bp, Artificial Sequence
  Synthetic
ccgttttttttttttgctagaaa

SEQ ID NO: 11108 - DNA, 23 bp, Artificial Sequence
  Synthetic
ccgttttttttttttgctagaaa

SEQ ID NO: 11109 - DNA, 23 bp, Artificial Sequence
  Synthetic
ccgttttttttttttcctggtcc

SEQ ID NO: 11110 - DNA, 23 bp, Artificial Sequence
  Synthetic
ccgttttttttttttcctggtcc

SEQ ID NO: 11111 - DNA, 23 bp, Artificial Sequence
  Synthetic
ccgttttttttttttcctggtcc

SEQ ID NO: 11112 - DNA, 23 bp, Artificial Sequence
  Synthetic
ccgttttttttttttattcaact

SEQ ID NO: 11113 - DNA, 23 bp, Artificial Sequence
  Synthetic
ccgttttttttttttattcaact

SEQ ID NO: 11114 - DNA, 23 bp, Artificial Sequence
  Synthetic
ccgttttttttttttattcaact

SEQ ID NO: 11115 - DNA, 23 bp, Artificial Sequence
  Synthetic
ccgttttttttttttacatactt

SEQ ID NO: 11116 - DNA, 23 bp, Artificial Sequence
  Synthetic
ccgttttttttttttcacaagtt

SEQ ID NO: 11117 - DNA, 23 bp, Artificial Sequence
  Synthetic
ccgttttttttttttcttcagtt

SEQ ID NO: 11118 - DNA, 23 bp, Artificial Sequence
  Synthetic
ccgttttttttttttcatagccc

SEQ ID NO: 11119 - DNA, 23 bp, Artificial Sequence
  Synthetic
ccgttttttttttttacaggagt

SEQ ID NO: 11120 - DNA, 23 bp, Artificial Sequence
  Synthetic
ccgttttttttttttgctacctg

SEQ ID NO: 11121 - DNA, 23 bp, Artificial Sequence
  Synthetic
ccgttttttttttttatctgcac

SEQ ID NO: 11122 - DNA, 23 bp, Artificial Sequence
  Synthetic
ccgttttttttttttgatagccc

SEQ ID NO: 11123 - DNA, 23 bp, Artificial Sequence
  Synthetic
ccgttttttttttttcacaaatt

SEQ ID NO: 11124 - DNA, 23 bp, Artificial Sequence
  Synthetic
ccgttttttttttttacaaattc

SEQ ID NO: 11125 - DNA, 23 bp, Artificial Sequence
  Synthetic
ccgttttttttttttggcattca

SEQ ID NO: 11126 - DNA, 23 bp, Artificial Sequence
  Synthetic
ccgttttttttttttcacaagtt

SEQ ID NO: 11127 - DNA, 23 bp, Artificial Sequence
  Synthetic
ccgttttttttttttaaaagaga

SEQ ID NO: 11128 - DNA, 23 bp, Artificial Sequence
  Synthetic
ccgttttttttttttgccctttt

SEQ ID NO: 11129 - DNA, 23 bp, Artificial Sequence
  Synthetic
ccgttttttttttttacagctgg

SEQ ID NO: 11130 - DNA, 23 bp, Artificial Sequence
  Synthetic
ccgttttttttttttccctctgg

SEQ ID NO: 11131 - DNA, 23 bp, Artificial Sequence
  Synthetic
ccgttttttttttttcacatagg

SEQ ID NO: 11132 - DNA, 23 bp, Artificial Sequence
  Synthetic
ccgttttttttttttccatcatc

SEQ ID NO: 11133 - DNA, 23 bp, Artificial Sequence
  Synthetic
ccgttttttttttttagacacgt

SEQ ID NO: 11134 - DNA, 23 bp, Artificial Sequence
  Synthetic
ccgttttttttttttgcatcttt

SEQ ID NO: 11135 - DNA, 23 bp, Artificial Sequence
  Synthetic
ccgttttttttttttgagctaca

SEQ ID NO: 11136 - DNA, 23 bp, Artificial Sequence
  Synthetic
ccgttttttttttttgtagtaca

SEQ ID NO: 11137 - DNA, 23 bp, Artificial Sequence
  Synthetic
ccgttttttttttttgcagaagc

SEQ ID NO: 11138 - DNA, 23 bp, Artificial Sequence
  Synthetic
ccgttttttttttttcgaaggca

SEQ ID NO: 11139 - DNA, 23 bp, Artificial Sequence
  Synthetic
ccgttttttttttttcacaaacc

SEQ ID NO: 11140 - DNA, 23 bp, Artificial Sequence
  Synthetic
ccgttttttttttttgtaaacca

SEQ ID NO: 11141 - DNA, 23 bp, Artificial Sequence
  Synthetic
ccgttttttttttttcgccaata

SEQ ID NO: 11142 - DNA, 23 bp, Artificial Sequence
  Synthetic
ccgttttttttttttacaagtgc

SEQ ID NO: 11143 - DNA, 23 bp, Artificial Sequence
  Synthetic
ccgttttttttttttactacctg

SEQ ID NO: 11144 - DNA, 23 bp, Artificial Sequence
  Synthetic
ccgttttttttttttatctgcac

SEQ ID NO: 11145 - DNA, 23 bp, Artificial Sequence
  Synthetic
ccgttttttttttttactcaccg

SEQ ID NO: 11146 - DNA, 23 bp, Artificial Sequence
  Synthetic
ccgttttttttttttggtacaat

SEQ ID NO: 11147 - DNA, 23 bp, Artificial Sequence
  Synthetic
ccgttttttttttttaacccacc

SEQ ID NO: 11148 - DNA, 23 bp, Artificial Sequence
  Synthetic
ccgttttttttttttactcaccg

SEQ ID NO: 11149 - DNA, 23 bp, Artificial Sequence
  Synthetic
ccgttttttttttttcagtgaat

SEQ ID NO: 11150 - DNA, 23 bp, Artificial Sequence
  Synthetic
ccgttttttttttttaagcccaa

SEQ ID NO: 11151 - DNA, 23 bp, Artificial Sequence
  Synthetic
ccgttttttttttttcggctgca

SEQ ID NO: 11152 - DNA, 23 bp, Artificial Sequence
  Synthetic
ccgttttttttttttaccctcca

SEQ ID NO: 11153 - DNA, 23 bp, Artificial Sequence
  Synthetic
ccgttttttttttttactgatat

SEQ ID NO: 11154 - DNA, 23 bp, Artificial Sequence
  Synthetic
ccgttttttttttttacctaata

SEQ ID NO: 11155 - DNA, 23 bp, Artificial Sequence
  Synthetic
ccgttttttttttttgccaatat

SEQ ID NO: 11156 - DNA, 23 bp, Artificial Sequence
  Synthetic
ccgttttttttttttcccaacaa

SEQ ID NO: 11157 - DNA, 23 bp, Artificial Sequence
  Synthetic
ccgttttttttttttgctgggtg

SEQ ID NO: 11158 - DNA, 23 bp, Artificial Sequence
  Synthetic
ccgttttttttttttcctatctc

SEQ ID NO: 11159 - DNA, 23 bp, Artificial Sequence
  Synthetic
ccgttttttttttttgaacaggt

SEQ ID NO: 11160 - DNA, 23 bp, Artificial Sequence
  Synthetic
ccgttttttttttttcagttttg

SEQ ID NO: 11161 - DNA, 23 bp, Artificial Sequence
  Synthetic
ccgttttttttttttcagttttg

SEQ ID NO: 11162 - DNA, 23 bp, Artificial Sequence
  Synthetic
ccgttttttttttttacctgcac

SEQ ID NO: 11163 - DNA, 23 bp, Artificial Sequence
  Synthetic
ccgttttttttttttaggcatag

SEQ ID NO: 11164 - DNA, 23 bp, Artificial Sequence
  Synthetic
ccgttttttttttttcagactcc

SEQ ID NO: 11165 - DNA, 23 bp, Artificial Sequence
  Synthetic
ccgttttttttttttcaacatca

SEQ ID NO: 11166 - DNA, 23 bp, Artificial Sequence
  Synthetic
ccgttttttttttttctgcctgt

SEQ ID NO: 11167 - DNA, 23 bp, Artificial Sequence
  Synthetic
ccgttttttttttttcacagttg

SEQ ID NO: 11168 - DNA, 23 bp, Artificial Sequence
  Synthetic
ccgttttttttttttatccaatc

SEQ ID NO: 11169 - DNA, 23 bp, Artificial Sequence
  Synthetic
ccgttttttttttttacatggtt

SEQ ID NO: 11170 - DNA, 23 bp, Artificial Sequence
  Synthetic
ccgttttttttttttacagttct

SEQ ID NO: 11171 - DNA, 23 bp, Artificial Sequence
  Synthetic
ccgttttttttttttaaagtgtc

SEQ ID NO: 11172 - DNA, 23 bp, Artificial Sequence
  Synthetic
ccgttttttttttttgaaaccca

SEQ ID NO: 11173 - DNA, 23 bp, Artificial Sequence
  Synthetic
ccgttttttttttttggggtatt

SEQ ID NO: 11174 - DNA, 23 bp, Artificial Sequence
  Synthetic
ccgttttttttttttaaacggaa

SEQ ID NO: 11175 - DNA, 23 bp, Artificial Sequence
  Synthetic
ccgttttttttttttggaaatcc

SEQ ID NO: 11176 - DNA, 23 bp, Artificial Sequence
  Synthetic
ccgttttttttttttgtggtaat

SEQ ID NO: 11177 - DNA, 23 bp, Artificial Sequence
  Synthetic
ccgttttttttttttctgttcct

SEQ ID NO: 11178 - DNA, 23 bp, Artificial Sequence
  Synthetic
ccgttttttttttttcagaccga

SEQ ID NO: 11179 - DNA, 23 bp, Artificial Sequence
  Synthetic
ccgttttttttttttagcctatc

SEQ ID NO: 11180 - DNA, 23 bp, Artificial Sequence
  Synthetic
ccgttttttttttttggcggaac

SEQ ID NO: 11181 - DNA, 23 bp, Artificial Sequence
  Synthetic
ccgttttttttttttctcaatag

SEQ ID NO: 11182 - DNA, 23 bp, Artificial Sequence
  Synthetic
ccgttttttttttttaaccgatt

SEQ ID NO: 11183 - DNA, 23 bp, Artificial Sequence
  Synthetic
ccgttttttttttttactgattt

SEQ ID NO: 11184 - DNA, 23 bp, Artificial Sequence
  Synthetic
ccgttttttttttttgctgcaaa

SEQ ID NO: 11185 - DNA, 23 bp, Artificial Sequence
  Synthetic
ccgttttttttttttcttccagt

SEQ ID NO: 11186 - DNA, 23 bp, Artificial Sequence
  Synthetic
ccgttttttttttttgctgagtg

SEQ ID NO: 11187 - DNA, 23 bp, Artificial Sequence
  Synthetic
ccgttttttttttttcttccagt

SEQ ID NO: 11188 - DNA, 23 bp, Artificial Sequence
  Synthetic
ccgttttttttttttcagctatg

SEQ ID NO: 11189 - DNA, 23 bp, Artificial Sequence
  Synthetic
ccgttttttttttttgcaactta

SEQ ID NO: 11190 - DNA, 23 bp, Artificial Sequence
  Synthetic
ccgttttttttttttcaatgcaa

SEQ ID NO: 11191 - DNA, 23 bp, Artificial Sequence
  Synthetic
ccgttttttttttttacaaccag

SEQ ID NO: 11192 - DNA, 23 bp, Artificial Sequence
  Synthetic
ccgttttttttttttaacaaaat

SEQ ID NO: 11193 - DNA, 23 bp, Artificial Sequence
  Synthetic
ccgttttttttttttacaggccg

SEQ ID NO: 11194 - DNA, 23 bp, Artificial Sequence
  Synthetic
ccgttttttttttttctacctgc

SEQ ID NO: 11195 - DNA, 23 bp, Artificial Sequence
  Synthetic
ccgttttttttttttgctcaata

SEQ ID NO: 11196 - DNA, 23 bp, Artificial Sequence
  Synthetic
ccgttttttttttttgcaaaaat

SEQ ID NO: 11197 - DNA, 23 bp, Artificial Sequence
  Synthetic
ccgttttttttttttaacaatac

SEQ ID NO: 11198 - DNA, 23 bp, Artificial Sequence
  Synthetic
ccgttttttttttttcacaagat

SEQ ID NO: 11199 - DNA, 23 bp, Artificial Sequence
  Synthetic
ccgttttttttttttcctctccc

SEQ ID NO: 11200 - DNA, 23 bp, Artificial Sequence
  Synthetic
ccgttttttttttttcttgcata

SEQ ID NO: 11201 - DNA, 23 bp, Artificial Sequence
  Synthetic
ccgttttttttttttcgcattct

SEQ ID NO: 11202 - DNA, 23 bp, Artificial Sequence
  Synthetic
ccgttttttttttttctcccacg

SEQ ID NO: 11203 - DNA, 23 bp, Artificial Sequence
  Synthetic
ccgttttttttttttggccgcga

SEQ ID NO: 11204 - DNA, 23 bp, Artificial Sequence
  Synthetic
ccgttttttttttttcgtataca

SEQ ID NO: 11205 - DNA, 23 bp, Artificial Sequence
  Synthetic
ccgttttttttttttgatacaag

SEQ ID NO: 11206 - DNA, 23 bp, Artificial Sequence
  Synthetic
ccgttttttttttttcttgacat

SEQ ID NO: 11207 - DNA, 23 bp, Artificial Sequence
  Synthetic
ccgttttttttttttcagaggcc

SEQ ID NO: 11208 - DNA, 23 bp, Artificial Sequence
  Synthetic
ccgttttttttttttaagctagt

SEQ ID NO: 11209 - DNA, 23 bp, Artificial Sequence
  Synthetic
ccgttttttttttttaagctagt

SEQ ID NO: 11210 - DNA, 23 bp, Artificial Sequence
  Synthetic
ccgttttttttttttaagctagt

SEQ ID NO: 11211 - DNA, 23 bp, Artificial Sequence
  Synthetic
ccgttttttttttttaagctagt

SEQ ID NO: 11212 - DNA, 23 bp, Artificial Sequence
  Synthetic
ccgttttttttttttcttgaact

SEQ ID NO: 11213 - DNA, 23 bp, Artificial Sequence
  Synthetic
ccgttttttttttttcttgaact

SEQ ID NO: 11214 - DNA, 23 bp, Artificial Sequence
  Synthetic
ccgttttttttttttgaccctgc

SEQ ID NO: 11215 - DNA, 23 bp, Artificial Sequence
  Synthetic
ccgttttttttttttataccaat

SEQ ID NO: 11216 - DNA, 23 bp, Artificial Sequence
  Synthetic
ccgttttttttttttggaggtgt

SEQ ID NO: 11217 - DNA, 23 bp, Artificial Sequence
  Synthetic
ccgttttttttttttgtgctcac

SEQ ID NO: 11218 - DNA, 23 bp, Artificial Sequence
  Synthetic
ccgttttttttttttggagctcc

SEQ ID NO: 11219 - DNA, 23 bp, Artificial Sequence
  Synthetic
ccgttttttttttttggagctcc

SEQ ID NO: 11220 - DNA, 23 bp, Artificial Sequence
  Synthetic
ccgttttttttttttgggagctc

SEQ ID NO: 11221 - DNA, 23 bp, Artificial Sequence
  Synthetic
ccgttttttttttttgggagctc

SEQ ID NO: 11222 - DNA, 23 bp, Artificial Sequence
  Synthetic
ccgttttttttttttggcgctat

SEQ ID NO: 11223 - DNA, 23 bp, Artificial Sequence
  Synthetic
ccgttttttttttttggcgctat

SEQ ID NO: 11224 - DNA, 23 bp, Artificial Sequence
  Synthetic
ccgttttttttttttggcgctat

SEQ ID NO: 11225 - DNA, 23 bp, Artificial Sequence
  Synthetic
ccgttttttttttttccctcaca

SEQ ID NO: 11226 - DNA, 23 bp, Artificial Sequence
  Synthetic
ccgttttttttttttccctcaca

SEQ ID NO: 11227 - DNA, 23 bp, Artificial Sequence
  Synthetic
ccgttttttttttttgtatgcaa

SEQ ID NO: 11228 - DNA, 23 bp, Artificial Sequence
  Synthetic
ccgttttttttttttgcgtgctc

SEQ ID NO: 11229 - DNA, 23 bp, Artificial Sequence
  Synthetic
ccgttttttttttttgcgtgctc

SEQ ID NO: 11230 - DNA, 23 bp, Artificial Sequence
  Synthetic
ccgttttttttttttgcgtgctc

SEQ ID NO: 11231 - DNA, 23 bp, Artificial Sequence
  Synthetic
ccgttttttttttttggcgtgct

SEQ ID NO: 11232 - DNA, 23 bp, Artificial Sequence
  Synthetic
ccgttttttttttttgttgcaca

SEQ ID NO: 11233 - DNA, 23 bp, Artificial Sequence
  Synthetic
ccgttttttttttttagcctgta

SEQ ID NO: 11234 - DNA, 23 bp, Artificial Sequence
  Synthetic
ccgttttttttttttagcctgta

SEQ ID NO: 11235 - DNA, 23 bp, Artificial Sequence
  Synthetic
ccgttttttttttttccagacat

SEQ ID NO: 11236 - DNA, 23 bp, Artificial Sequence
  Synthetic
ccgttttttttttttccagacat

SEQ ID NO: 11237 - DNA, 23 bp, Artificial Sequence
  Synthetic
ccgttttttttttttccagacat

SEQ ID NO: 11238 - DNA, 23 bp, Artificial Sequence
  Synthetic
ccgttttttttttttcacaagtt

SEQ ID NO: 11239 - DNA, 23 bp, Artificial Sequence
  Synthetic
ccgttttttttttttcttcagtt

SEQ ID NO: 11240 - DNA, 23 bp, Artificial Sequence
  Synthetic
ccgttttttttttttcatagccc

SEQ ID NO: 11241 - DNA, 23 bp, Artificial Sequence
  Synthetic
ccgttttttttttttacaggagt

SEQ ID NO: 11242 - DNA, 23 bp, Artificial Sequence
  Synthetic
ccgttttttttttttgctacctg

SEQ ID NO: 11243 - DNA, 23 bp, Artificial Sequence
  Synthetic
ccgttttttttttttatctgcac

SEQ ID NO: 11244 - DNA, 23 bp, Artificial Sequence
  Synthetic
ccgttttttttttttgatagccc

SEQ ID NO: 11245 - DNA, 23 bp, Artificial Sequence
  Synthetic
ccgttttttttttttcacaaatt

SEQ ID NO: 11246 - DNA, 23 bp, Artificial Sequence
  Synthetic
ccgttttttttttttggcattca

SEQ ID NO: 11247 - DNA, 23 bp, Artificial Sequence
  Synthetic
ccgttttttttttttcacaagtt

SEQ ID NO: 11248 - DNA, 23 bp, Artificial Sequence
  Synthetic
ccgttttttttttttagccaagc

SEQ ID NO: 11249 - DNA, 23 bp, Artificial Sequence
  Synthetic
ccgttttttttttttaaaagaga

SEQ ID NO: 11250 - DNA, 23 bp, Artificial Sequence
  Synthetic
ccgttttttttttttacagctgg

SEQ ID NO: 11251 - DNA, 23 bp, Artificial Sequence
  Synthetic
ccgttttttttttttccctctgg

SEQ ID NO: 11252 - DNA, 23 bp, Artificial Sequence
  Synthetic
ccgttttttttttttcacatagg

SEQ ID NO: 11253 - DNA, 23 bp, Artificial Sequence
  Synthetic
ccgttttttttttttccatcatc

SEQ ID NO: 11254 - DNA, 23 bp, Artificial Sequence
  Synthetic
ccgttttttttttttccatcttt

SEQ ID NO: 11255 - DNA, 23 bp, Artificial Sequence
  Synthetic
ccgttttttttttttgagctaca

SEQ ID NO: 11256 - DNA, 23 bp, Artificial Sequence
  Synthetic
ccgttttttttttttctagtaca

SEQ ID NO: 11257 - DNA, 23 bp, Artificial Sequence
  Synthetic
ccgttttttttttttaagggatt

SEQ ID NO: 11258 - DNA, 23 bp, Artificial Sequence
  Synthetic
ccgttttttttttttgcagaagc

SEQ ID NO: 11259 - DNA, 23 bp, Artificial Sequence
  Synthetic
ccgttttttttttttcacttttg

SEQ ID NO: 11260 - DNA, 23 bp, Artificial Sequence
  Synthetic
ccgttttttttttttcgaaggca

SEQ ID NO: 11261 - DNA, 23 bp, Artificial Sequence
  Synthetic
ccgttttttttttttcacaaacc

SEQ ID NO: 11262 - DNA, 23 bp, Artificial Sequence
  Synthetic
ccgttttttttttttgtaaacca

SEQ ID NO: 11263 - DNA, 23 bp, Artificial Sequence
  Synthetic
ccgttttttttttttcgccaata

SEQ ID NO: 11264 - DNA, 23 bp, Artificial Sequence
  Synthetic
ccgttttttttttttacaagtgc

SEQ ID NO: 11265 - DNA, 23 bp, Artificial Sequence
  Synthetic
ccgttttttttttttactacctg

SEQ ID NO: 11266 - DNA, 23 bp, Artificial Sequence
  Synthetic
ccgttttttttttttatctgcac

SEQ ID NO: 11267 - DNA, 23 bp, Artificial Sequence
  Synthetic
ccgttttttttttttactcaccg

SEQ ID NO: 11268 - DNA, 23 bp, Artificial Sequence
  Synthetic
ccgttttttttttttggtacaat

SEQ ID NO: 11269 - DNA, 23 bp, Artificial Sequence
  Synthetic
ccgttttttttttttaacccacc

SEQ ID NO: 11270 - DNA, 23 bp, Artificial Sequence
  Synthetic
ccgttttttttttttgtgagttc

SEQ ID NO: 11271 - DNA, 23 bp, Artificial Sequence
  Synthetic
ccgttttttttttttacccttat

SEQ ID NO: 11272 - DNA, 23 bp, Artificial Sequence
  Synthetic
ccgttttttttttttcggctgca

SEQ ID NO: 11273 - DNA, 23 bp, Artificial Sequence
  Synthetic
ccgttttttttttttaccctcca

SEQ ID NO: 11274 - DNA, 23 bp, Artificial Sequence
  Synthetic
ccgttttttttttttactgatat

SEQ ID NO: 11275 - DNA, 23 bp, Artificial Sequence
  Synthetic
ccgttttttttttttccacatgg

SEQ ID NO: 11276 - DNA, 23 bp, Artificial Sequence
  Synthetic
ccgttttttttttttccaacaac

SEQ ID NO: 11277 - DNA, 23 bp, Artificial Sequence
  Synthetic
ccgttttttttttttcccaacaa

SEQ ID NO: 11278 - DNA, 23 bp, Artificial Sequence
  Synthetic
ccgttttttttttttgctgggtg

SEQ ID NO: 11279 - DNA, 23 bp, Artificial Sequence
  Synthetic
ccgttttttttttttcctatctc

SEQ ID NO: 11280 - DNA, 23 bp, Artificial Sequence
  Synthetic
ccgttttttttttttgaacaggt

SEQ ID NO: 11281 - DNA, 23 bp, Artificial Sequence
  Synthetic
ccgttttttttttttcagttttg

SEQ ID NO: 11282 - DNA, 23 bp, Artificial Sequence
  Synthetic
ccgttttttttttttcagttttg

SEQ ID NO: 11283 - DNA, 23 bp, Artificial Sequence
  Synthetic
ccgttttttttttttacctgcac

SEQ ID NO: 11284 - DNA, 23 bp, Artificial Sequence
  Synthetic
ccgttttttttttttccatcatt

SEQ ID NO: 11285 - DNA, 23 bp, Artificial Sequence
  Synthetic
ccgttttttttttttaggcatag

SEQ ID NO: 11286 - DNA, 23 bp, Artificial Sequence
  Synthetic
ccgttttttttttttccacacac

SEQ ID NO: 11287 - DNA, 23 bp, Artificial Sequence
  Synthetic
ccgttttttttttttcaacatca

SEQ ID NO: 11288 - DNA, 23 bp, Artificial Sequence
  Synthetic
ccgttttttttttttaggcgaag

SEQ ID NO: 11289 - DNA, 23 bp, Artificial Sequence
  Synthetic
ccgttttttttttttctgcctgt

SEQ ID NO: 11290 - DNA, 23 bp, Artificial Sequence
  Synthetic
ccgttttttttttttgtctgtca

SEQ ID NO: 11291 - DNA, 23 bp, Artificial Sequence
  Synthetic
ccgttttttttttttcacagttg

SEQ ID NO: 11292 - DNA, 23 bp, Artificial Sequence
  Synthetic
ccgttttttttttttacatggtt

SEQ ID NO: 11293 - DNA, 23 bp, Artificial Sequence
  Synthetic
ccgttttttttttttagaattgc

SEQ ID NO: 11294 - DNA, 23 bp, Artificial Sequence
  Synthetic
ccgttttttttttttacagttct

SEQ ID NO: 11295 - DNA, 23 bp, Artificial Sequence
  Synthetic
ccgttttttttttttgaaaccca

SEQ ID NO: 11296 - DNA, 23 bp, Artificial Sequence
  Synthetic
ccgttttttttttttggggtatt

SEQ ID NO: 11297 - DNA, 23 bp, Artificial Sequence
  Synthetic
ccgttttttttttttaaacggaa

SEQ ID NO: 11298 - DNA, 23 bp, Artificial Sequence
  Synthetic
ccgttttttttttttggaaatcc

SEQ ID NO: 11299 - DNA, 23 bp, Artificial Sequence
  Synthetic
ccgttttttttttttgtggtaat

SEQ ID NO: 11300 - DNA, 23 bp, Artificial Sequence
  Synthetic
ccgttttttttttttctgttcct

SEQ ID NO: 11301 - DNA, 23 bp, Artificial Sequence
  Synthetic
ccgttttttttttttcagaccga

SEQ ID NO: 11302 - DNA, 23 bp, Artificial Sequence
  Synthetic
ccgttttttttttttagcctatc

SEQ ID NO: 11303 - DNA, 23 bp, Artificial Sequence
  Synthetic
ccgttttttttttttggcggaac

SEQ ID NO: 11304 - DNA, 23 bp, Artificial Sequence
  Synthetic
ccgttttttttttttctcaatag

SEQ ID NO: 11305 - DNA, 23 bp, Artificial Sequence
  Synthetic
ccgttttttttttttaaccgatt

SEQ ID NO: 11306 - DNA, 23 bp, Artificial Sequence
  Synthetic
ccgttttttttttttactgattt

SEQ ID NO: 11307 - DNA, 23 bp, Artificial Sequence
  Synthetic
ccgttttttttttttgctgcaaa

SEQ ID NO: 11308 - DNA, 23 bp, Artificial Sequence
  Synthetic
ccgttttttttttttcttccagt

SEQ ID NO: 11309 - DNA, 23 bp, Artificial Sequence
  Synthetic
ccgttttttttttttcagctatg

SEQ ID NO: 11310 - DNA, 23 bp, Artificial Sequence
  Synthetic
ccgttttttttttttgcaactta

SEQ ID NO: 11311 - DNA, 23 bp, Artificial Sequence
  Synthetic
ccgttttttttttttcaatgcaa

SEQ ID NO: 11312 - DNA, 23 bp, Artificial Sequence
  Synthetic
ccgttttttttttttacaaccag

SEQ ID NO: 11313 - DNA, 23 bp, Artificial Sequence
  Synthetic
ccgttttttttttttaacaaaat

SEQ ID NO: 11314 - DNA, 23 bp, Artificial Sequence
  Synthetic
ccgttttttttttttacaggccg

SEQ ID NO: 11315 - DNA, 23 bp, Artificial Sequence
  Synthetic
ccgttttttttttttctacctgc

SEQ ID NO: 11316 - DNA, 23 bp, Artificial Sequence
  Synthetic
ccgttttttttttttgctcaata

SEQ ID NO: 11317 - DNA, 23 bp, Artificial Sequence
  Synthetic
ccgttttttttttttaacaatac

SEQ ID NO: 11318 - DNA, 23 bp, Artificial Sequence
  Synthetic
ccgttttttttttttcacaagat

SEQ ID NO: 11319 - DNA, 23 bp, Artificial Sequence
  Synthetic
ccgttttttttttttgtgctcac

SEQ ID NO: 11320 - DNA, 23 bp, Artificial Sequence
  Synthetic
ccgttttttttttttgtgctcac

SEQ ID NO: 11321 - DNA, 23 bp, Artificial Sequence
  Synthetic
ccgttttttttttttgtgctcac

SEQ ID NO: 11322 - DNA, 23 bp, Artificial Sequence
  Synthetic
ccgttttttttttttgtgctcac

SEQ ID NO: 11323 - DNA, 23 bp, Artificial Sequence
  Synthetic
ccgttttttttttttgtgctcac

SEQ ID NO: 11324 - DNA, 23 bp, Artificial Sequence
  Synthetic
ccgttttttttttttgtgctcac

SEQ ID NO: 11325 - DNA, 23 bp, Artificial Sequence
  Synthetic
ccgttttttttttttgtgctctc

SEQ ID NO: 11326 - DNA, 23 bp, Artificial Sequence
  Synthetic
ccgttttttttttttgtgctctc

SEQ ID NO: 11327 - DNA, 23 bp, Artificial Sequence
  Synthetic
ccgttttttttttttgtgctctc

SEQ ID NO: 11328 - DNA, 23 bp, Artificial Sequence
  Synthetic
ccgttttttttttttgtgctctc

SEQ ID NO: 11329 - DNA, 23 bp, Artificial Sequence
  Synthetic
ccgttttttttttttgtgctccc

SEQ ID NO: 11330 - DNA, 23 bp, Artificial Sequence
  Synthetic
ccgttttttttttttagagctcc

SEQ ID NO: 11331 - DNA, 23 bp, Artificial Sequence
  Synthetic
ccgttttttttttttagagctcc

SEQ ID NO: 11332 - DNA, 23 bp, Artificial Sequence
  Synthetic
ccgttttttttttttagagctcc

SEQ ID NO: 11333 - DNA, 23 bp, Artificial Sequence
  Synthetic
ccgttttttttttttaggagctc

SEQ ID NO: 11334 - DNA, 23 bp, Artificial Sequence
  Synthetic
ccgttttttttttttaggagctc

SEQ ID NO: 11335 - DNA, 23 bp, Artificial Sequence
  Synthetic
ccgttttttttttttcgagctcc

SEQ ID NO: 11336 - DNA, 23 bp, Artificial Sequence
  Synthetic
ccgttttttttttttggcataca

SEQ ID NO: 11337 - DNA, 23 bp, Artificial Sequence
  Synthetic
ccgttttttttttttggcataca

SEQ ID NO: 11338 - DNA, 23 bp, Artificial Sequence
  Synthetic
ccgttttttttttttggcataca

SEQ ID NO: 11339 - DNA, 23 bp, Artificial Sequence
  Synthetic
ccgttttttttttttggcataca

SEQ ID NO: 11340 - DNA, 23 bp, Artificial Sequence
  Synthetic
ccgttttttttttttggcattca

SEQ ID NO: 11341 - DNA, 23 bp, Artificial Sequence
  Synthetic
ccgttttttttttttggcattca

SEQ ID NO: 11342 - DNA, 23 bp, Artificial Sequence
  Synthetic
ccgttttttttttttggcatcca

SEQ ID NO: 11343 - DNA, 23 bp, Artificial Sequence
  Synthetic
ccgttttttttttttggcatgca

SEQ ID NO: 11344 - DNA, 23 bp, Artificial Sequence
  Synthetic
ccgttttttttttttctggatgc

SEQ ID NO: 11345 - DNA, 23 bp, Artificial Sequence
  Synthetic
ccgttttttttttttctggatgc

SEQ ID NO: 11346 - DNA, 23 bp, Artificial Sequence
  Synthetic
ccgttttttttttttctggatgc

SEQ ID NO: 11347 - DNA, 23 bp, Artificial Sequence
  Synthetic
ccgttttttttttttgcacgtgc

SEQ ID NO: 11348 - DNA, 23 bp, Artificial Sequence
  Synthetic
ccgttttttttttttgcacgtgc

SEQ ID NO: 11349 - DNA, 23 bp, Artificial Sequence
  Synthetic
ccgttttttttttttgcacgtgc

SEQ ID NO: 11350 - DNA, 23 bp, Artificial Sequence
  Synthetic
ccgttttttttttttgcacgtgc

SEQ ID NO: 11351 - DNA, 23 bp, Artificial Sequence
  Synthetic
ccgttttttttttttgcacgtgc

SEQ ID NO: 11352 - DNA, 23 bp, Artificial Sequence
  Synthetic
ccgttttttttttttagcatgtg

SEQ ID NO: 11353 - DNA, 23 bp, Artificial Sequence
  Synthetic
ccgttttttttttttggggaatg

SEQ ID NO: 11354 - DNA, 23 bp, Artificial Sequence
  Synthetic
ccgttttttttttttggggaatg

SEQ ID NO: 11355 - DNA, 23 bp, Artificial Sequence
  Synthetic
ccgttttttttttttggggaatg

SEQ ID NO: 11356 - DNA, 23 bp, Artificial Sequence
  Synthetic
ccgttttttttttttggggaatg

SEQ ID NO: 11357 - DNA, 23 bp, Artificial Sequence
  Synthetic
ccgttttttttttttggggaatg

SEQ ID NO: 11358 - DNA, 23 bp, Artificial Sequence
  Synthetic
ccgttttttttttttggggaatg

SEQ ID NO: 11359 - DNA, 23 bp, Artificial Sequence
  Synthetic
ccgttttttttttttggggaatg

SEQ ID NO: 11360 - DNA, 23 bp, Artificial Sequence
  Synthetic
ccgttttttttttttggggaatg

SEQ ID NO: 11361 - DNA, 23 bp, Artificial Sequence
  Synthetic
ccgttttttttttttggggaatg

SEQ ID NO: 11362 - DNA, 23 bp, Artificial Sequence
  Synthetic
ccgttttttttttttggggaatg

SEQ ID NO: 11363 - DNA, 23 bp, Artificial Sequence
  Synthetic
ccgttttttttttttggggaatg

SEQ ID NO: 11364 - DNA, 23 bp, Artificial Sequence
  Synthetic
ccgttttttttttttggggaatg

SEQ ID NO: 11365 - DNA, 23 bp, Artificial Sequence
  Synthetic
ccgttttttttttttggggaatg

SEQ ID NO: 11366 - DNA, 23 bp, Artificial Sequence
  Synthetic
ccgttttttttttttaaggaatg

SEQ ID NO: 11367 - DNA, 23 bp, Artificial Sequence
  Synthetic
ccgttttttttttttaaggaatg

SEQ ID NO: 11368 - DNA, 23 bp, Artificial Sequence
  Synthetic
ccgttttttttttttaaggaatg

SEQ ID NO: 11369 - DNA, 23 bp, Artificial Sequence
  Synthetic
ccgttttttttttttaaggaatg

SEQ ID NO: 11370 - DNA, 23 bp, Artificial Sequence
  Synthetic
ccgttttttttttttagatcatg

SEQ ID NO: 11371 - DNA, 23 bp, Artificial Sequence
  Synthetic
ccgttttttttttttagatcatg

SEQ ID NO: 11372 - DNA, 23 bp, Artificial Sequence
  Synthetic
ccgttttttttttttagatcatg

SEQ ID NO: 11373 - DNA, 23 bp, Artificial Sequence
  Synthetic
ccgttttttttttttagatcatg

SEQ ID NO: 11374 - DNA, 23 bp, Artificial Sequence
  Synthetic
ccgttttttttttttcagatcat

SEQ ID NO: 11375 - DNA, 23 bp, Artificial Sequence
  Synthetic
ccgttttttttttttaagatcat

SEQ ID NO: 11376 - DNA, 23 bp, Artificial Sequence
  Synthetic
ccgttttttttttttaagatcat

SEQ ID NO: 11377 - DNA, 23 bp, Artificial Sequence
  Synthetic
ccgttttttttttttcagatcat

SEQ ID NO: 11378 - DNA, 23 bp, Artificial Sequence
  Synthetic
ccgttttttttttttcccgacct

SEQ ID NO: 11379 - DNA, 23 bp, Artificial Sequence
  Synthetic
ccgttttttttttttcccgacct

SEQ ID NO: 11380 - DNA, 23 bp, Artificial Sequence
  Synthetic
ccgttttttttttttcggcaagt

SEQ ID NO: 11381 - DNA, 23 bp, Artificial Sequence
  Synthetic
ccgttttttttttttccgacaag

SEQ ID NO: 11382 - DNA, 23 bp, Artificial Sequence
  Synthetic
ccgttttttttttttgggcaagt

SEQ ID NO: 11383 - DNA, 23 bp, Artificial Sequence
  Synthetic
ccgttttttttttttgggcaagt

SEQ ID NO: 11384 - DNA, 23 bp, Artificial Sequence
  Synthetic
ccgttttttttttttgggcaagt

SEQ ID NO: 11385 - DNA, 23 bp, Artificial Sequence
  Synthetic
ccgttttttttttttgggcaagt

SEQ ID NO: 11386 - DNA, 23 bp, Artificial Sequence
  Synthetic
ccgttttttttttttgggcaagt

SEQ ID NO: 11387 - DNA, 23 bp, Artificial Sequence
  Synthetic
ccgttttttttttttcggcaagt

SEQ ID NO: 11388 - DNA, 23 bp, Artificial Sequence
  Synthetic
ccgttttttttttttcggcaagt

SEQ ID NO: 11389 - DNA, 23 bp, Artificial Sequence
  Synthetic
ccgttttttttttttccggcaag

SEQ ID NO: 11390 - DNA, 23 bp, Artificial Sequence
  Synthetic
ccgttttttttttttccggcaag

SEQ ID NO: 11391 - DNA, 23 bp, Artificial Sequence
  Synthetic
ccgttttttttttttccggcaag

SEQ ID NO: 11392 - DNA, 23 bp, Artificial Sequence
  Synthetic
ccgttttttttttttccggcaag

SEQ ID NO: 11393 - DNA, 23 bp, Artificial Sequence
  Synthetic
ccgttttttttttttccggcaag

SEQ ID NO: 11394 - DNA, 23 bp, Artificial Sequence
  Synthetic
ccgttttttttttttcaggcaag

SEQ ID NO: 11395 - DNA, 23 bp, Artificial Sequence
  Synthetic
ccgttttttttttttcaggcaag

SEQ ID NO: 11396 - DNA, 23 bp, Artificial Sequence
  Synthetic
ccgttttttttttttcaggcaag

SEQ ID NO: 11397 - DNA, 23 bp, Artificial Sequence
  Synthetic
ccgttttttttttttcaggcaag

SEQ ID NO: 11398 - DNA, 23 bp, Artificial Sequence
  Synthetic
ccgttttttttttttcaggcaag

SEQ ID NO: 11399 - DNA, 23 bp, Artificial Sequence
  Synthetic
ccgttttttttttttcggcaagt

SEQ ID NO: 11400 - DNA, 23 bp, Artificial Sequence
  Synthetic
ccgttttttttttttcaggcaag

SEQ ID NO: 11401 - DNA, 23 bp, Artificial Sequence
  Synthetic
ccgttttttttttttcaggcaag

SEQ ID NO: 11402 - DNA, 23 bp, Artificial Sequence
  Synthetic
ccgttttttttttttcaggcaag

SEQ ID NO: 11403 - DNA, 23 bp, Artificial Sequence
  Synthetic
ccgttttttttttttaggcaagt

SEQ ID NO: 11404 - DNA, 23 bp, Artificial Sequence
  Synthetic
ccgttttttttttttcggcaagt

SEQ ID NO: 11405 - DNA, 23 bp, Artificial Sequence
  Synthetic
ccgttttttttttttccggcaag

SEQ ID NO: 11406 - DNA, 23 bp, Artificial Sequence
  Synthetic
ccgttttttttttttaggcaagt

SEQ ID NO: 11407 - DNA, 23 bp, Artificial Sequence
  Synthetic
ccgttttttttttttgggcaagt

SEQ ID NO: 11408 - DNA, 23 bp, Artificial Sequence
  Synthetic
ccgttttttttttttgggcaagt

SEQ ID NO: 11409 - DNA, 23 bp, Artificial Sequence
  Synthetic
ccgttttttttttttcgagcaag

SEQ ID NO: 11410 - DNA, 23 bp, Artificial Sequence
  Synthetic
ccgttttttttttttcaggcaat

SEQ ID NO: 11411 - DNA, 23 bp, Artificial Sequence
  Synthetic
ccgttttttttttttccggcaaa

SEQ ID NO: 11412 - DNA, 23 bp, Artificial Sequence
  Synthetic
ccgttttttttttttcgtgatat

SEQ ID NO: 11413 - DNA, 23 bp, Artificial Sequence
  Synthetic
ccgttttttttttttcgtgatat

SEQ ID NO: 11414 - DNA, 23 bp, Artificial Sequence
  Synthetic
ccgttttttttttttgatattgg

SEQ ID NO: 11415 - DNA, 23 bp, Artificial Sequence
  Synthetic
ccgttttttttttttgatattgg

SEQ ID NO: 11416 - DNA, 23 bp, Artificial Sequence
  Synthetic
ccgttttttttttttgatattgg

SEQ ID NO: 11417 - DNA, 23 bp, Artificial Sequence
  Synthetic
ccgttttttttttttgatattgg

SEQ ID NO: 11418 - DNA, 23 bp, Artificial Sequence
  Synthetic
ccgttttttttttttgatattgg

SEQ ID NO: 11419 - DNA, 23 bp, Artificial Sequence
  Synthetic
ccgttttttttttttgatattgg

SEQ ID NO: 11420 - DNA, 23 bp, Artificial Sequence
  Synthetic
ccgttttttttttttgatattgg

SEQ ID NO: 11421 - DNA, 23 bp, Artificial Sequence
  Synthetic
ccgttttttttttttagtattgg

SEQ ID NO: 11422 - DNA, 23 bp, Artificial Sequence
  Synthetic
ccgttttttttttttgatattgg

SEQ ID NO: 11423 - DNA, 23 bp, Artificial Sequence
  Synthetic
ccgttttttttttttatgcagca

SEQ ID NO: 11424 - DNA, 23 bp, Artificial Sequence
  Synthetic
ccgttttttttttttatgcagca

SEQ ID NO: 11425 - DNA, 23 bp, Artificial Sequence
  Synthetic
ccgttttttttttttatgcagca

SEQ ID NO: 11426 - DNA, 23 bp, Artificial Sequence
  Synthetic
ccgttttttttttttatgcagca

SEQ ID NO: 11427 - DNA, 23 bp, Artificial Sequence
  Synthetic
ccgttttttttttttatgcagca

SEQ ID NO: 11428 - DNA, 23 bp, Artificial Sequence
  Synthetic
ccgttttttttttttatgcagca

SEQ ID NO: 11429 - DNA, 23 bp, Artificial Sequence
  Synthetic
ccgttttttttttttctgcagca

SEQ ID NO: 11430 - DNA, 23 bp, Artificial Sequence
  Synthetic
ccgttttttttttttctgcagca

SEQ ID NO: 11431 - DNA, 23 bp, Artificial Sequence
  Synthetic
ccgttttttttttttgcagcatc

SEQ ID NO: 11432 - DNA, 23 bp, Artificial Sequence
  Synthetic
ccgttttttttttttgggagctc

SEQ ID NO: 11433 - DNA, 23 bp, Artificial Sequence
  Synthetic
ccgttttttttttttgggagctc

SEQ ID NO: 11434 - DNA, 23 bp, Artificial Sequence
  Synthetic
ccgttttttttttttgggagctc

SEQ ID NO: 11435 - DNA, 23 bp, Artificial Sequence
  Synthetic
ccgttttttttttttgggagctc

SEQ ID NO: 11436 - DNA, 23 bp, Artificial Sequence
  Synthetic
ccgttttttttttttaggagctc

SEQ ID NO: 11437 - DNA, 23 bp, Artificial Sequence
  Synthetic
ccgttttttttttttaggagctc

SEQ ID NO: 11438 - DNA, 23 bp, Artificial Sequence
  Synthetic
ccgttttttttttttaggagctc

SEQ ID NO: 11439 - DNA, 23 bp, Artificial Sequence
  Synthetic
ccgttttttttttttaggagctc

SEQ ID NO: 11440 - DNA, 23 bp, Artificial Sequence
  Synthetic
ccgttttttttttttgggagctc

SEQ ID NO: 11441 - DNA, 23 bp, Artificial Sequence
  Synthetic
ccgttttttttttttggcgctat

SEQ ID NO: 11442 - DNA, 23 bp, Artificial Sequence
  Synthetic
ccgttttttttttttggcgctat

SEQ ID NO: 11443 - DNA, 23 bp, Artificial Sequence
  Synthetic
ccgttttttttttttggcgctat

SEQ ID NO: 11444 - DNA, 23 bp, Artificial Sequence
  Synthetic
ccgttttttttttttggcgctat

SEQ ID NO: 11445 - DNA, 23 bp, Artificial Sequence
  Synthetic
ccgttttttttttttgatcaatg

SEQ ID NO: 11446 - DNA, 23 bp, Artificial Sequence
  Synthetic
ccgttttttttttttgatcaatg

SEQ ID NO: 11447 - DNA, 23 bp, Artificial Sequence
  Synthetic
ccgttttttttttttgatcaatg

SEQ ID NO: 11448 - DNA, 23 bp, Artificial Sequence
  Synthetic
ccgttttttttttttgatcaatg

SEQ ID NO: 11449 - DNA, 23 bp, Artificial Sequence
  Synthetic
ccgttttttttttttggaggtgg

SEQ ID NO: 11450 - DNA, 23 bp, Artificial Sequence
  Synthetic
ccgttttttttttttggaggtgg

SEQ ID NO: 11451 - DNA, 23 bp, Artificial Sequence
  Synthetic
ccgttttttttttttgagttcct

SEQ ID NO: 11452 - DNA, 23 bp, Artificial Sequence
  Synthetic
ccgttttttttttttgagttccc

SEQ ID NO: 11453 - DNA, 23 bp, Artificial Sequence
  Synthetic
ccgttttttttttttgagttccc

SEQ ID NO: 11454 - DNA, 23 bp, Artificial Sequence
  Synthetic
ccgttttttttttttgagttccc

SEQ ID NO: 11455 - DNA, 23 bp, Artificial Sequence
  Synthetic
ccgttttttttttttgagttccc

SEQ ID NO: 11456 - DNA, 23 bp, Artificial Sequence
  Synthetic
ccgttttttttttttgagttccc

SEQ ID NO: 11457 - DNA, 23 bp, Artificial Sequence
  Synthetic
ccgttttttttttttgagttccc

SEQ ID NO: 11458 - DNA, 23 bp, Artificial Sequence
  Synthetic
ccgttttttttttttgagttccc

SEQ ID NO: 11459 - DNA, 23 bp, Artificial Sequence
  Synthetic
ccgttttttttttttgagttccc

SEQ ID NO: 11460 - DNA, 23 bp, Artificial Sequence
  Synthetic
ccgttttttttttttgagttccc

SEQ ID NO: 11461 - DNA, 23 bp, Artificial Sequence
  Synthetic
ccgttttttttttttcagttcaa

SEQ ID NO: 11462 - DNA, 23 bp, Artificial Sequence
  Synthetic
ccgttttttttttttcagttcaa

SEQ ID NO: 11463 - DNA, 23 bp, Artificial Sequence
  Synthetic
ccgttttttttttttaagttcaa

SEQ ID NO: 11464 - DNA, 23 bp, Artificial Sequence
  Synthetic
ccgttttttttttttaagttcaa

SEQ ID NO: 11465 - DNA, 23 bp, Artificial Sequence
  Synthetic
ccgttttttttttttaagttcaa

SEQ ID NO: 11466 - DNA, 23 bp, Artificial Sequence
  Synthetic
ccgttttttttttttcagttcaa

SEQ ID NO: 11467 - DNA, 23 bp, Artificial Sequence
  Synthetic
ccgttttttttttttaagttcaa

SEQ ID NO: 11468 - DNA, 23 bp, Artificial Sequence
  Synthetic
ccgttttttttttttcatcaacg

SEQ ID NO: 11469 - DNA, 23 bp, Artificial Sequence
  Synthetic
ccgttttttttttttcatcaacg

SEQ ID NO: 11470 - DNA, 23 bp, Artificial Sequence
  Synthetic
ccgttttttttttttcatcaaag

SEQ ID NO: 11471 - DNA, 23 bp, Artificial Sequence
  Synthetic
ccgttttttttttttaaggggtg

SEQ ID NO: 11472 - DNA, 23 bp, Artificial Sequence
  Synthetic
ccgttttttttttttcaggggcg

SEQ ID NO: 11473 - DNA, 23 bp, Artificial Sequence
  Synthetic
ccgttttttttttttcaggggcg

SEQ ID NO: 11474 - DNA, 23 bp, Artificial Sequence
  Synthetic
ccgttttttttttttcggggcaa

SEQ ID NO: 11475 - DNA, 23 bp, Artificial Sequence
  Synthetic
ccgttttttttttttccgggcaa

SEQ ID NO: 11476 - DNA, 23 bp, Artificial Sequence
  Synthetic
ccgttttttttttttccgggcaa

SEQ ID NO: 11477 - DNA, 23 bp, Artificial Sequence
  Synthetic
ccgttttttttttttcggggcaa

SEQ ID NO: 11478 - DNA, 23 bp, Artificial Sequence
  Synthetic
ccgttttttttttttcggggcaa

SEQ ID NO: 11479 - DNA, 23 bp, Artificial Sequence
  Synthetic
ccgttttttttttttcagggcaa

SEQ ID NO: 11480 - DNA, 23 bp, Artificial Sequence
  Synthetic
ccgttttttttttttcagggcaa

SEQ ID NO: 11481 - DNA, 23 bp, Artificial Sequence
  Synthetic
ccgttttttttttttcagggaaa

SEQ ID NO: 11482 - DNA, 23 bp, Artificial Sequence
  Synthetic
ccgttttttttttttagggcaac

SEQ ID NO: 11483 - DNA, 23 bp, Artificial Sequence
  Synthetic
ccgttttttttttttccggacaa

SEQ ID NO: 11484 - DNA, 23 bp, Artificial Sequence
  Synthetic
ccgttttttttttttgtgagcaa

SEQ ID NO: 11485 - DNA, 23 bp, Artificial Sequence
  Synthetic
ccgttttttttttttgagggcaa

SEQ ID NO: 11486 - DNA, 23 bp, Artificial Sequence
  Synthetic
ccgttttttttttttcgagtttg

SEQ ID NO: 11487 - DNA, 23 bp, Artificial Sequence
  Synthetic
ccgttttttttttttcgagtttg

SEQ ID NO: 11488 - DNA, 23 bp, Artificial Sequence
  Synthetic
ccgttttttttttttcgagtttg

SEQ ID NO: 11489 - DNA, 23 bp, Artificial Sequence
  Synthetic
ccgttttttttttttgccaggga

SEQ ID NO: 11490 - DNA, 23 bp, Artificial Sequence
  Synthetic
ccgttttttttttttgggatggg

SEQ ID NO: 11491 - DNA, 23 bp, Artificial Sequence
  Synthetic
ccgttttttttttttgggatggg

SEQ ID NO: 11492 - DNA, 23 bp, Artificial Sequence
  Synthetic
ccgttttttttttttggaagcct

SEQ ID NO: 11493 - DNA, 23 bp, Artificial Sequence
  Synthetic
ccgttttttttttttggaagccc

SEQ ID NO: 11494 - DNA, 23 bp, Artificial Sequence
  Synthetic
ccgttttttttttttcccagcca

SEQ ID NO: 11495 - DNA, 23 bp, Artificial Sequence
  Synthetic
ccgttttttttttttcccagcca

SEQ ID NO: 11496 - DNA, 23 bp, Artificial Sequence
  Synthetic
ccgttttttttttttcccagcca

SEQ ID NO: 11497 - DNA, 23 bp, Artificial Sequence
  Synthetic
ccgttttttttttttcttaatca

SEQ ID NO: 11498 - DNA, 23 bp, Artificial Sequence
  Synthetic
ccgttttttttttttcttaatca

SEQ ID NO: 11499 - DNA, 23 bp, Artificial Sequence
  Synthetic
ccgttttttttttttcttaatca

SEQ ID NO: 11500 - DNA, 23 bp, Artificial Sequence
  Synthetic
ccgttttttttttttcttaatca

SEQ ID NO: 11501 - DNA, 23 bp, Artificial Sequence
  Synthetic
ccgttttttttttttctttgcaa

SEQ ID NO: 11502 - DNA, 23 bp, Artificial Sequence
  Synthetic
ccgttttttttttttgcaaagaa

SEQ ID NO: 11503 - DNA, 23 bp, Artificial Sequence
  Synthetic
ccgttttttttttttgcaaagaa

SEQ ID NO: 11504 - DNA, 23 bp, Artificial Sequence
  Synthetic
ccgttttttttttttggaagcct

SEQ ID NO: 11505 - DNA, 23 bp, Artificial Sequence
  Synthetic
ccgttttttttttttggaagcct

SEQ ID NO: 11506 - DNA, 23 bp, Artificial Sequence
  Synthetic
ccgttttttttttttccctaaaa

SEQ ID NO: 11507 - DNA, 23 bp, Artificial Sequence
  Synthetic
ccgttttttttttttccctaaaa

SEQ ID NO: 11508 - DNA, 23 bp, Artificial Sequence
  Synthetic
ccgttttttttttttccctaaaa

SEQ ID NO: 11509 - DNA, 23 bp, Artificial Sequence
  Synthetic
ccgttttttttttttcctaaaaa

SEQ ID NO: 11510 - DNA, 23 bp, Artificial Sequence
  Synthetic
ccgttttttttttttccctaaaa

SEQ ID NO: 11511 - DNA, 23 bp, Artificial Sequence
  Synthetic
ccgttttttttttttccctaaaa

SEQ ID NO: 11512 - DNA, 23 bp, Artificial Sequence
  Synthetic
ccgttttttttttttccctaaaa

SEQ ID NO: 11513 - DNA, 23 bp, Artificial Sequence
  Synthetic
ccgttttttttttttccctaaaa

SEQ ID NO: 11514 - DNA, 23 bp, Artificial Sequence
  Synthetic
ccgttttttttttttccctaaaa

SEQ ID NO: 11515 - DNA, 23 bp, Artificial Sequence
  Synthetic
ccgttttttttttttccctaaaa

SEQ ID NO: 11516 - DNA, 23 bp, Artificial Sequence
  Synthetic
ccgttttttttttttccctaaaa

SEQ ID NO: 11517 - DNA, 23 bp, Artificial Sequence
  Synthetic
ccgttttttttttttccctaaaa

SEQ ID NO: 11518 - DNA, 23 bp, Artificial Sequence
  Synthetic
ccgttttttttttttccctaaaa

SEQ ID NO: 11519 - DNA, 23 bp, Artificial Sequence
  Synthetic
ccgttttttttttttccctaaaa

SEQ ID NO: 11520 - DNA, 23 bp, Artificial Sequence
  Synthetic
ccgttttttttttttccctaaaa

SEQ ID NO: 11521 - DNA, 23 bp, Artificial Sequence
  Synthetic
ccgttttttttttttccctaaaa

SEQ ID NO: 11522 - DNA, 23 bp, Artificial Sequence
  Synthetic
ccgttttttttttttccctaaaa

SEQ ID NO: 11523 - DNA, 23 bp, Artificial Sequence
  Synthetic
ccgttttttttttttccctaaaa

SEQ ID NO: 11524 - DNA, 23 bp, Artificial Sequence
  Synthetic
ccgttttttttttttccctaaaa

SEQ ID NO: 11525 - DNA, 23 bp, Artificial Sequence
  Synthetic
ccgttttttttttttgatgagcc

SEQ ID NO: 11526 - DNA, 23 bp, Artificial Sequence
  Synthetic
ccgttttttttttttgttcaacg

SEQ ID NO: 11527 - DNA, 23 bp, Artificial Sequence
  Synthetic
ccgttttttttttttgttcaaca

SEQ ID NO: 11528 - DNA, 23 bp, Artificial Sequence
  Synthetic
ccgttttttttttttgcttaagc

SEQ ID NO: 11529 - DNA, 23 bp, Artificial Sequence
  Synthetic
ccgttttttttttttgcttaagc

SEQ ID NO: 11530 - DNA, 23 bp, Artificial Sequence
  Synthetic
ccgttttttttttttgcttaagc

SEQ ID NO: 11531 - DNA, 23 bp, Artificial Sequence
  Synthetic
ccgttttttttttttgcttaagc

SEQ ID NO: 11532 - DNA, 23 bp, Artificial Sequence
  Synthetic
ccgttttttttttttgcttaagc

SEQ ID NO: 11533 - DNA, 23 bp, Artificial Sequence
  Synthetic
ccgttttttttttttggaatggg

SEQ ID NO: 11534 - DNA, 23 bp, Artificial Sequence
  Synthetic
ccgttttttttttttcacaagtt

SEQ ID NO: 11535 - DNA, 23 bp, Artificial Sequence
  Synthetic
ccgttttttttttttcttcagtt

SEQ ID NO: 11536 - DNA, 23 bp, Artificial Sequence
  Synthetic
ccgttttttttttttcatagccc

SEQ ID NO: 11537 - DNA, 23 bp, Artificial Sequence
  Synthetic
ccgttttttttttttacaggagt

SEQ ID NO: 11538 - DNA, 23 bp, Artificial Sequence
  Synthetic
ccgttttttttttttgctacctg

SEQ ID NO: 11539 - DNA, 23 bp, Artificial Sequence
  Synthetic
ccgttttttttttttatctgcac

SEQ ID NO: 11540 - DNA, 23 bp, Artificial Sequence
  Synthetic
ccgttttttttttttgatagccc

SEQ ID NO: 11541 - DNA, 23 bp, Artificial Sequence
  Synthetic
ccgttttttttttttggcattca

SEQ ID NO: 11542 - DNA, 23 bp, Artificial Sequence
  Synthetic
ccgttttttttttttcacaagtt

SEQ ID NO: 11543 - DNA, 23 bp, Artificial Sequence
  Synthetic
ccgttttttttttttagccaagc

SEQ ID NO: 11544 - DNA, 23 bp, Artificial Sequence
  Synthetic
ccgttttttttttttaaaagaga

SEQ ID NO: 11545 - DNA, 23 bp, Artificial Sequence
  Synthetic
ccgttttttttttttcagctggt

SEQ ID NO: 11546 - DNA, 23 bp, Artificial Sequence
  Synthetic
ccgttttttttttttcacatagg

SEQ ID NO: 11547 - DNA, 23 bp, Artificial Sequence
  Synthetic
ccgttttttttttttccatcatc

SEQ ID NO: 11548 - DNA, 23 bp, Artificial Sequence
  Synthetic
ccgttttttttttttctaccata

SEQ ID NO: 11549 - DNA, 23 bp, Artificial Sequence
  Synthetic
ccgttttttttttttgagctaca

SEQ ID NO: 11550 - DNA, 23 bp, Artificial Sequence
  Synthetic
ccgttttttttttttctagtaca

SEQ ID NO: 11551 - DNA, 23 bp, Artificial Sequence
  Synthetic
ccgttttttttttttaagggatt

SEQ ID NO: 11552 - DNA, 23 bp, Artificial Sequence
  Synthetic
ccgttttttttttttgcagaagc

SEQ ID NO: 11553 - DNA, 23 bp, Artificial Sequence
  Synthetic
ccgttttttttttttcgaaggca

SEQ ID NO: 11554 - DNA, 23 bp, Artificial Sequence
  Synthetic
ccgttttttttttttcacaaacc

SEQ ID NO: 11555 - DNA, 23 bp, Artificial Sequence
  Synthetic
ccgttttttttttttgtaaacca

SEQ ID NO: 11556 - DNA, 23 bp, Artificial Sequence
  Synthetic
ccgttttttttttttcgccaata

SEQ ID NO: 11557 - DNA, 23 bp, Artificial Sequence
  Synthetic
ccgttttttttttttacaagtgc

SEQ ID NO: 11558 - DNA, 23 bp, Artificial Sequence
  Synthetic
ccgttttttttttttactacctg

SEQ ID NO: 11559 - DNA, 23 bp, Artificial Sequence
  Synthetic
ccgttttttttttttatctgcac

SEQ ID NO: 11560 - DNA, 23 bp, Artificial Sequence
  Synthetic
ccgttttttttttttactcaccg

SEQ ID NO: 11561 - DNA, 23 bp, Artificial Sequence
  Synthetic
ccgttttttttttttggtacaat

SEQ ID NO: 11562 - DNA, 23 bp, Artificial Sequence
  Synthetic
ccgttttttttttttaacccacc

SEQ ID NO: 11563 - DNA, 23 bp, Artificial Sequence
  Synthetic
ccgttttttttttttactcaccg

SEQ ID NO: 11564 - DNA, 23 bp, Artificial Sequence
  Synthetic
ccgttttttttttttcagtgaat

SEQ ID NO: 11565 - DNA, 23 bp, Artificial Sequence
  Synthetic
ccgttttttttttttacccttat

SEQ ID NO: 11566 - DNA, 23 bp, Artificial Sequence
  Synthetic
ccgttttttttttttaagcccaa

SEQ ID NO: 11567 - DNA, 23 bp, Artificial Sequence
  Synthetic
ccgttttttttttttaccctcca

SEQ ID NO: 11568 - DNA, 23 bp, Artificial Sequence
  Synthetic
ccgttttttttttttacctaata

SEQ ID NO: 11569 - DNA, 23 bp, Artificial Sequence
  Synthetic
ccgttttttttttttccacatgg

SEQ ID NO: 11570 - DNA, 23 bp, Artificial Sequence
  Synthetic
ccgttttttttttttcccaacaa

SEQ ID NO: 11571 - DNA, 23 bp, Artificial Sequence
  Synthetic
ccgttttttttttttgctgggtg

SEQ ID NO: 11572 - DNA, 23 bp, Artificial Sequence
  Synthetic
ccgttttttttttttcctatctc

SEQ ID NO: 11573 - DNA, 23 bp, Artificial Sequence
  Synthetic
ccgttttttttttttgaacaggt

SEQ ID NO: 11574 - DNA, 23 bp, Artificial Sequence
  Synthetic
ccgttttttttttttcagttttg

SEQ ID NO: 11575 - DNA, 23 bp, Artificial Sequence
  Synthetic
ccgttttttttttttcagttttg

SEQ ID NO: 11576 - DNA, 23 bp, Artificial Sequence
  Synthetic
ccgttttttttttttacctgcac

SEQ ID NO: 11577 - DNA, 23 bp, Artificial Sequence
  Synthetic
ccgttttttttttttaggcatag

SEQ ID NO: 11578 - DNA, 23 bp, Artificial Sequence
  Synthetic
ccgttttttttttttcagactcc

SEQ ID NO: 11579 - DNA, 23 bp, Artificial Sequence
  Synthetic
ccgttttttttttttcaacatca

SEQ ID NO: 11580 - DNA, 23 bp, Artificial Sequence
  Synthetic
ccgttttttttttttctgcctgt

SEQ ID NO: 11581 - DNA, 23 bp, Artificial Sequence
  Synthetic
ccgttttttttttttgtctgtca

SEQ ID NO: 11582 - DNA, 23 bp, Artificial Sequence
  Synthetic
ccgttttttttttttcacagttg

SEQ ID NO: 11583 - DNA, 23 bp, Artificial Sequence
  Synthetic
ccgttttttttttttacatggtt

SEQ ID NO: 11584 - DNA, 23 bp, Artificial Sequence
  Synthetic
ccgttttttttttttacagttct

SEQ ID NO: 11585 - DNA, 23 bp, Artificial Sequence
  Synthetic
ccgttttttttttttaaagtgtc

SEQ ID NO: 11586 - DNA, 23 bp, Artificial Sequence
  Synthetic
ccgttttttttttttggggtatt

SEQ ID NO: 11587 - DNA, 23 bp, Artificial Sequence
  Synthetic
ccgttttttttttttaaacggaa

SEQ ID NO: 11588 - DNA, 23 bp, Artificial Sequence
  Synthetic
ccgttttttttttttggaaatcc

SEQ ID NO: 11589 - DNA, 23 bp, Artificial Sequence
  Synthetic
ccgttttttttttttgtggtaat

SEQ ID NO: 11590 - DNA, 23 bp, Artificial Sequence
  Synthetic
ccgttttttttttttctgttcct

SEQ ID NO: 11591 - DNA, 23 bp, Artificial Sequence
  Synthetic
ccgttttttttttttcagaccga

SEQ ID NO: 11592 - DNA, 23 bp, Artificial Sequence
  Synthetic
ccgttttttttttttagcctatc

SEQ ID NO: 11593 - DNA, 23 bp, Artificial Sequence
  Synthetic
ccgttttttttttttggcggaac

SEQ ID NO: 11594 - DNA, 23 bp, Artificial Sequence
  Synthetic
ccgttttttttttttctcaatag

SEQ ID NO: 11595 - DNA, 23 bp, Artificial Sequence
  Synthetic
ccgttttttttttttaaccgatt

SEQ ID NO: 11596 - DNA, 23 bp, Artificial Sequence
  Synthetic
ccgttttttttttttactgattt

SEQ ID NO: 11597 - DNA, 23 bp, Artificial Sequence
  Synthetic
ccgttttttttttttgctgcaaa

SEQ ID NO: 11598 - DNA, 23 bp, Artificial Sequence
  Synthetic
ccgttttttttttttcttccagt

SEQ ID NO: 11599 - DNA, 23 bp, Artificial Sequence
  Synthetic
ccgttttttttttttgctgagtg

SEQ ID NO: 11600 - DNA, 23 bp, Artificial Sequence
  Synthetic
ccgttttttttttttgctgagag

SEQ ID NO: 11601 - DNA, 23 bp, Artificial Sequence
  Synthetic
ccgttttttttttttcttccagt

SEQ ID NO: 11602 - DNA, 23 bp, Artificial Sequence
  Synthetic
ccgttttttttttttcagctatg

SEQ ID NO: 11603 - DNA, 23 bp, Artificial Sequence
  Synthetic
ccgttttttttttttgcaactta

SEQ ID NO: 11604 - DNA, 23 bp, Artificial Sequence
  Synthetic
ccgttttttttttttcaatgcaa

SEQ ID NO: 11605 - DNA, 23 bp, Artificial Sequence
  Synthetic
ccgttttttttttttacaaccag

SEQ ID NO: 11606 - DNA, 23 bp, Artificial Sequence
  Synthetic
ccgttttttttttttaacaaaat

SEQ ID NO: 11607 - DNA, 23 bp, Artificial Sequence
  Synthetic
ccgttttttttttttcatacagc

SEQ ID NO: 11608 - DNA, 23 bp, Artificial Sequence
  Synthetic
ccgttttttttttttacaggccg

SEQ ID NO: 11609 - DNA, 23 bp, Artificial Sequence
  Synthetic
ccgttttttttttttctacctgc

SEQ ID NO: 11610 - DNA, 23 bp, Artificial Sequence
  Synthetic
ccgttttttttttttgctcaata

SEQ ID NO: 11611 - DNA, 23 bp, Artificial Sequence
  Synthetic
ccgttttttttttttgcaaaaat

SEQ ID NO: 11612 - DNA, 23 bp, Artificial Sequence
  Synthetic
ccgttttttttttttaacaatac

SEQ ID NO: 11613 - DNA, 23 bp, Artificial Sequence
  Synthetic
ccgttttttttttttcacaagat

SEQ ID NO: 11614 - DNA, 23 bp, Artificial Sequence
  Synthetic
ccgttttttttttttaaccccgg

SEQ ID NO: 11615 - DNA, 23 bp, Artificial Sequence
  Synthetic
ccgttttttttttttctatcagg

SEQ ID NO: 11616 - DNA, 23 bp, Artificial Sequence
  Synthetic
ccgttttttttttttccccgtat

SEQ ID NO: 11617 - DNA, 23 bp, Artificial Sequence
  Synthetic
ccgttttttttttttctagccag

SEQ ID NO: 11618 - DNA, 23 bp, Artificial Sequence
  Synthetic
ccgttttttttttttcccactgt

SEQ ID NO: 11619 - DNA, 23 bp, Artificial Sequence
  Synthetic
ccgttttttttttttccctggac

SEQ ID NO: 11620 - DNA, 23 bp, Artificial Sequence
  Synthetic
ccgttttttttttttgtcgttca

SEQ ID NO: 11621 - DNA, 23 bp, Artificial Sequence
  Synthetic
ccgttttttttttttatcaagcg

SEQ ID NO: 11622 - DNA, 23 bp, Artificial Sequence
  Synthetic
ccgttttttttttttaaaccaca

SEQ ID NO: 11623 - DNA, 23 bp, Artificial Sequence
  Synthetic
ccgttttttttttttggaacagg

SEQ ID NO: 11624 - DNA, 23 bp, Artificial Sequence
  Synthetic
ccgttttttttttttggaatgaa

SEQ ID NO: 11625 - DNA, 23 bp, Artificial Sequence
  Synthetic
ccgttttttttttttggaaattc

SEQ ID NO: 11626 - DNA, 23 bp, Artificial Sequence
  Synthetic
ccgttttttttttttagcagtag

SEQ ID NO: 11627 - DNA, 23 bp, Artificial Sequence
  Synthetic
ccgttttttttttttagacctag

SEQ ID NO: 11628 - DNA, 23 bp, Artificial Sequence
  Synthetic
ccgttttttttttttaacaccgc

SEQ ID NO: 11629 - DNA, 23 bp, Artificial Sequence
  Synthetic
ccgttttttttttttacacctag

SEQ ID NO: 11630 - DNA, 23 bp, Artificial Sequence
  Synthetic
ccgttttttttttttagcacatc

SEQ ID NO: 11631 - DNA, 23 bp, Artificial Sequence
  Synthetic
ccgttttttttttttgacatagt

SEQ ID NO: 11632 - DNA, 23 bp, Artificial Sequence
  Synthetic
ccgttttttttttttcacagcac

SEQ ID NO: 11633 - DNA, 23 bp, Artificial Sequence
  Synthetic
ccgttttttttttttcagtaagc

SEQ ID NO: 11634 - DNA, 23 bp, Artificial Sequence
  Synthetic
ccgttttttttttttcaatgggc

SEQ ID NO: 11635 - DNA, 23 bp, Artificial Sequence
  Synthetic
ccgttttttttttttactaaggg

SEQ ID NO: 11636 - DNA, 23 bp, Artificial Sequence
  Synthetic
ccgttttttttttttaactatac

SEQ ID NO: 11637 - DNA, 23 bp, Artificial Sequence
  Synthetic
ccgttttttttttttaaccacac

SEQ ID NO: 11638 - DNA, 23 bp, Artificial Sequence
  Synthetic
ccgttttttttttttaaccatac

SEQ ID NO: 11639 - DNA, 23 bp, Artificial Sequence
  Synthetic
ccgttttttttttttactatgca

SEQ ID NO: 11640 - DNA, 23 bp, Artificial Sequence
  Synthetic
ccgttttttttttttagaaaggc

SEQ ID NO: 11641 - DNA, 23 bp, Artificial Sequence
  Synthetic
ccgttttttttttttactataca

SEQ ID NO: 11642 - DNA, 23 bp, Artificial Sequence
  Synthetic
ccgttttttttttttaactatac

SEQ ID NO: 11643 - DNA, 23 bp, Artificial Sequence
  Synthetic
ccgttttttttttttacagcaca

SEQ ID NO: 11644 - DNA, 23 bp, Artificial Sequence
  Synthetic
ccgttttttttttttacacactt

SEQ ID NO: 11645 - DNA, 23 bp, Artificial Sequence
  Synthetic
ccgttttttttttttgggtacat

SEQ ID NO: 11646 - DNA, 23 bp, Artificial Sequence
  Synthetic
ccgttttttttttttcacaagtt

SEQ ID NO: 11647 - DNA, 23 bp, Artificial Sequence
  Synthetic
ccgttttttttttttcttcagtt

SEQ ID NO: 11648 - DNA, 23 bp, Artificial Sequence
  Synthetic
ccgttttttttttttcttcagct

SEQ ID NO: 11649 - DNA, 23 bp, Artificial Sequence
  Synthetic
ccgttttttttttttcatagccc

SEQ ID NO: 11650 - DNA, 23 bp, Artificial Sequence
  Synthetic
ccgttttttttttttatctgcac

SEQ ID NO: 11651 - DNA, 23 bp, Artificial Sequence
  Synthetic
ccgttttttttttttgatagccc

SEQ ID NO: 11652 - DNA, 23 bp, Artificial Sequence
  Synthetic
ccgttttttttttttcacaaatt

SEQ ID NO: 11653 - DNA, 23 bp, Artificial Sequence
  Synthetic
ccgttttttttttttacacaaat

SEQ ID NO: 11654 - DNA, 23 bp, Artificial Sequence
  Synthetic
ccgttttttttttttacaaacac

SEQ ID NO: 11655 - DNA, 23 bp, Artificial Sequence
  Synthetic
ccgttttttttttttggcattca

SEQ ID NO: 11656 - DNA, 23 bp, Artificial Sequence
  Synthetic
ccgttttttttttttcacaggtt

SEQ ID NO: 11657 - DNA, 23 bp, Artificial Sequence
  Synthetic
ccgttttttttttttcacaagtt

SEQ ID NO: 11658 - DNA, 23 bp, Artificial Sequence
  Synthetic
ccgttttttttttttgcattatt

SEQ ID NO: 11659 - DNA, 23 bp, Artificial Sequence
  Synthetic
ccgttttttttttttcgcgtacc

SEQ ID NO: 11660 - DNA, 23 bp, Artificial Sequence
  Synthetic
ccgttttttttttttagccaagc

SEQ ID NO: 11661 - DNA, 23 bp, Artificial Sequence
  Synthetic
ccgttttttttttttaaaagaga

SEQ ID NO: 11662 - DNA, 23 bp, Artificial Sequence
  Synthetic
ccgttttttttttttgaaagaga

SEQ ID NO: 11663 - DNA, 23 bp, Artificial Sequence
  Synthetic
ccgttttttttttttagcaagcc

SEQ ID NO: 11664 - DNA, 23 bp, Artificial Sequence
  Synthetic
ccgttttttttttttatgctttt

SEQ ID NO: 11665 - DNA, 23 bp, Artificial Sequence
  Synthetic
ccgttttttttttttatgccctt

SEQ ID NO: 11666 - DNA, 23 bp, Artificial Sequence
  Synthetic
ccgttttttttttttatgccctt

SEQ ID NO: 11667 - DNA, 23 bp, Artificial Sequence
  Synthetic
ccgttttttttttttcgaccatg

SEQ ID NO: 11668 - DNA, 23 bp, Artificial Sequence
  Synthetic
ccgttttttttttttacagctgg

SEQ ID NO: 11669 - DNA, 23 bp, Artificial Sequence
  Synthetic
ccgttttttttttttagctggtt

SEQ ID NO: 11670 - DNA, 23 bp, Artificial Sequence
  Synthetic
ccgttttttttttttccctctgg

SEQ ID NO: 11671 - DNA, 23 bp, Artificial Sequence
  Synthetic
ccgttttttttttttcacatagg

SEQ ID NO: 11672 - DNA, 23 bp, Artificial Sequence
  Synthetic
ccgttttttttttttcacatagg

SEQ ID NO: 11673 - DNA, 23 bp, Artificial Sequence
  Synthetic
ccgttttttttttttccatcatc

SEQ ID NO: 11674 - DNA, 23 bp, Artificial Sequence
  Synthetic
ccgttttttttttttctacgcgt

SEQ ID NO: 11675 - DNA, 23 bp, Artificial Sequence
  Synthetic
ccgttttttttttttgattcaca

SEQ ID NO: 11676 - DNA, 23 bp, Artificial Sequence
  Synthetic
ccgttttttttttttagacacgt

SEQ ID NO: 11677 - DNA, 23 bp, Artificial Sequence
  Synthetic
ccgttttttttttttctaccata

SEQ ID NO: 11678 - DNA, 23 bp, Artificial Sequence
  Synthetic
ccgttttttttttttgtccgtgg

SEQ ID NO: 11679 - DNA, 23 bp, Artificial Sequence
  Synthetic
ccgttttttttttttccatcttt

SEQ ID NO: 11680 - DNA, 23 bp, Artificial Sequence
  Synthetic
ccgttttttttttttccataaag

SEQ ID NO: 11681 - DNA, 23 bp, Artificial Sequence
  Synthetic
ccgttttttttttttgtagtgct

SEQ ID NO: 11682 - DNA, 23 bp, Artificial Sequence
  Synthetic
ccgttttttttttttgagctaca

SEQ ID NO: 11683 - DNA, 23 bp, Artificial Sequence
  Synthetic
ccgttttttttttttctagtaca

SEQ ID NO: 11684 - DNA, 23 bp, Artificial Sequence
  Synthetic
ccgttttttttttttaagggatt

SEQ ID NO: 11685 - DNA, 23 bp, Artificial Sequence
  Synthetic
ccgttttttttttttaacccatg

SEQ ID NO: 11686 - DNA, 23 bp, Artificial Sequence
  Synthetic
ccgttttttttttttacaaagtt

SEQ ID NO: 11687 - DNA, 23 bp, Artificial Sequence
  Synthetic
ccgttttttttttttcactggta

SEQ ID NO: 11688 - DNA, 23 bp, Artificial Sequence
  Synthetic
ccgttttttttttttcctcaagg

SEQ ID NO: 11689 - DNA, 23 bp, Artificial Sequence
  Synthetic
ccgttttttttttttactagact

SEQ ID NO: 11690 - DNA, 23 bp, Artificial Sequence
  Synthetic
ccgttttttttttttcccaagtt

SEQ ID NO: 11691 - DNA, 23 bp, Artificial Sequence
  Synthetic
ccgttttttttttttcacttttg

SEQ ID NO: 11692 - DNA, 23 bp, Artificial Sequence
  Synthetic
ccgttttttttttttcgaaggca

SEQ ID NO: 11693 - DNA, 23 bp, Artificial Sequence
  Synthetic
ccgttttttttttttgtaaacca

SEQ ID NO: 11694 - DNA, 23 bp, Artificial Sequence
  Synthetic
ccgttttttttttttcgccaata

SEQ ID NO: 11695 - DNA, 23 bp, Artificial Sequence
  Synthetic
ccgttttttttttttactacctg

SEQ ID NO: 11696 - DNA, 23 bp, Artificial Sequence
  Synthetic
ccgttttttttttttatctgcac

SEQ ID NO: 11697 - DNA, 23 bp, Artificial Sequence
  Synthetic
ccgttttttttttttactcaccg

SEQ ID NO: 11698 - DNA, 23 bp, Artificial Sequence
  Synthetic
ccgttttttttttttggtacaat

SEQ ID NO: 11699 - DNA, 23 bp, Artificial Sequence
  Synthetic
ccgttttttttttttcccaccga

SEQ ID NO: 11700 - DNA, 23 bp, Artificial Sequence
  Synthetic
ccgttttttttttttactcaccg

SEQ ID NO: 11701 - DNA, 23 bp, Artificial Sequence
  Synthetic
ccgttttttttttttcagtgaat

SEQ ID NO: 11702 - DNA, 23 bp, Artificial Sequence
  Synthetic
ccgttttttttttttacccttat

SEQ ID NO: 11703 - DNA, 23 bp, Artificial Sequence
  Synthetic
ccgttttttttttttgaactgcc

SEQ ID NO: 11704 - DNA, 23 bp, Artificial Sequence
  Synthetic
ccgttttttttttttaagcccaa

SEQ ID NO: 11705 - DNA, 23 bp, Artificial Sequence
  Synthetic
ccgttttttttttttcggctgca

SEQ ID NO: 11706 - DNA, 23 bp, Artificial Sequence
  Synthetic
ccgttttttttttttactgatat

SEQ ID NO: 11707 - DNA, 23 bp, Artificial Sequence
  Synthetic
ccgttttttttttttacctaata

SEQ ID NO: 11708 - DNA, 23 bp, Artificial Sequence
  Synthetic
ccgttttttttttttagctgctt

SEQ ID NO: 11709 - DNA, 23 bp, Artificial Sequence
  Synthetic
ccgttttttttttttggctgtca

SEQ ID NO: 11710 - DNA, 23 bp, Artificial Sequence
  Synthetic
ccgttttttttttttctgggact

SEQ ID NO: 11711 - DNA, 23 bp, Artificial Sequence
  Synthetic
ccgttttttttttttccacatgg

SEQ ID NO: 11712 - DNA, 23 bp, Artificial Sequence
  Synthetic
ccgttttttttttttgccaatat

SEQ ID NO: 11713 - DNA, 23 bp, Artificial Sequence
  Synthetic
ccgttttttttttttccaacaac

SEQ ID NO: 11714 - DNA, 23 bp, Artificial Sequence
  Synthetic
ccgttttttttttttccaacaac

SEQ ID NO: 11715 - DNA, 23 bp, Artificial Sequence
  Synthetic
ccgttttttttttttgaacaggt

SEQ ID NO: 11716 - DNA, 23 bp, Artificial Sequence
  Synthetic
ccgttttttttttttcagttttg

SEQ ID NO: 11717 - DNA, 23 bp, Artificial Sequence
  Synthetic
ccgttttttttttttcagttttg

SEQ ID NO: 11718 - DNA, 23 bp, Artificial Sequence
  Synthetic
ccgttttttttttttacatcgtt

SEQ ID NO: 11719 - DNA, 23 bp, Artificial Sequence
  Synthetic
ccgttttttttttttgtcatcat

SEQ ID NO: 11720 - DNA, 23 bp, Artificial Sequence
  Synthetic
ccgttttttttttttccatcatt

SEQ ID NO: 11721 - DNA, 23 bp, Artificial Sequence
  Synthetic
ccgttttttttttttctagtggt

SEQ ID NO: 11722 - DNA, 23 bp, Artificial Sequence
  Synthetic
ccgttttttttttttaggcatag

SEQ ID NO: 11723 - DNA, 23 bp, Artificial Sequence
  Synthetic
ccgttttttttttttcagactcc

SEQ ID NO: 11724 - DNA, 23 bp, Artificial Sequence
  Synthetic
ccgttttttttttttccacacac

SEQ ID NO: 11725 - DNA, 23 bp, Artificial Sequence
  Synthetic
ccgttttttttttttaagggagg

SEQ ID NO: 11726 - DNA, 23 bp, Artificial Sequence
  Synthetic
ccgttttttttttttacaagctt

SEQ ID NO: 11727 - DNA, 23 bp, Artificial Sequence
  Synthetic
ccgttttttttttttctacctgc

SEQ ID NO: 11728 - DNA, 23 bp, Artificial Sequence
  Synthetic
ccgttttttttttttgtaagtgc

SEQ ID NO: 11729 - DNA, 23 bp, Artificial Sequence
  Synthetic
ccgttttttttttttacctgcac

SEQ ID NO: 11730 - DNA, 23 bp, Artificial Sequence
  Synthetic
ccgttttttttttttcagaagtg

SEQ ID NO: 11731 - DNA, 23 bp, Artificial Sequence
  Synthetic
ccgttttttttttttcaacatca

SEQ ID NO: 11732 - DNA, 23 bp, Artificial Sequence
  Synthetic
ccgttttttttttttcagccgct

SEQ ID NO: 11733 - DNA, 23 bp, Artificial Sequence
  Synthetic
ccgttttttttttttaggcaaag

SEQ ID NO: 11734 - DNA, 23 bp, Artificial Sequence
  Synthetic
ccgttttttttttttggccgtga

SEQ ID NO: 11735 - DNA, 23 bp, Artificial Sequence
  Synthetic
ccgttttttttttttctgcctgt

SEQ ID NO: 11736 - DNA, 23 bp, Artificial Sequence
  Synthetic
ccgttttttttttttgtctgtca

SEQ ID NO: 11737 - DNA, 23 bp, Artificial Sequence
  Synthetic
ccgttttttttttttcacagttg

SEQ ID NO: 11738 - DNA, 23 bp, Artificial Sequence
  Synthetic
ccgttttttttttttatccagtc

SEQ ID NO: 11739 - DNA, 23 bp, Artificial Sequence
  Synthetic
ccgttttttttttttacatggtt

SEQ ID NO: 11740 - DNA, 23 bp, Artificial Sequence
  Synthetic
ccgttttttttttttagaattgc

SEQ ID NO: 11741 - DNA, 23 bp, Artificial Sequence
  Synthetic
ccgttttttttttttacagttct

SEQ ID NO: 11742 - DNA, 23 bp, Artificial Sequence
  Synthetic
ccgttttttttttttaaagcttg

SEQ ID NO: 11743 - DNA, 23 bp, Artificial Sequence
  Synthetic
ccgttttttttttttgaaaccca

SEQ ID NO: 11744 - DNA, 23 bp, Artificial Sequence
  Synthetic
ccgttttttttttttgagaccca

SEQ ID NO: 11745 - DNA, 23 bp, Artificial Sequence
  Synthetic
ccgttttttttttttggggtatt

SEQ ID NO: 11746 - DNA, 23 bp, Artificial Sequence
  Synthetic
ccgttttttttttttaaacggaa

SEQ ID NO: 11747 - DNA, 23 bp, Artificial Sequence
  Synthetic
ccgttttttttttttggaaatcc

SEQ ID NO: 11748 - DNA, 23 bp, Artificial Sequence
  Synthetic
ccgttttttttttttggtaatcc

SEQ ID NO: 11749 - DNA, 23 bp, Artificial Sequence
  Synthetic
ccgttttttttttttctgttcct

SEQ ID NO: 11750 - DNA, 23 bp, Artificial Sequence
  Synthetic
ccgttttttttttttcagaccga

SEQ ID NO: 11751 - DNA, 23 bp, Artificial Sequence
  Synthetic
ccgttttttttttttgcctatcc

SEQ ID NO: 11752 - DNA, 23 bp, Artificial Sequence
  Synthetic
ccgttttttttttttaacctatc

SEQ ID NO: 11753 - DNA, 23 bp, Artificial Sequence
  Synthetic
ccgttttttttttttgcggaact

SEQ ID NO: 11754 - DNA, 23 bp, Artificial Sequence
  Synthetic
ccgttttttttttttgcagaact

SEQ ID NO: 11755 - DNA, 23 bp, Artificial Sequence
  Synthetic
ccgttttttttttttctcaatag

SEQ ID NO: 11756 - DNA, 23 bp, Artificial Sequence
  Synthetic
ccgttttttttttttaaaaagtg

SEQ ID NO: 11757 - DNA, 23 bp, Artificial Sequence
  Synthetic
ccgttttttttttttggcacaca

SEQ ID NO: 11758 - DNA, 23 bp, Artificial Sequence
  Synthetic
ccgttttttttttttagagaggg

SEQ ID NO: 11759 - DNA, 23 bp, Artificial Sequence
  Synthetic
ccgttttttttttttacactcaa

SEQ ID NO: 11760 - DNA, 23 bp, Artificial Sequence
  Synthetic
ccgttttttttttttcaaaagag

SEQ ID NO: 11761 - DNA, 23 bp, Artificial Sequence
  Synthetic
ccgttttttttttttacaggatt

SEQ ID NO: 11762 - DNA, 23 bp, Artificial Sequence
  Synthetic
ccgttttttttttttcatgcata

SEQ ID NO: 11763 - DNA, 23 bp, Artificial Sequence
  Synthetic
ccgttttttttttttggaagaac

SEQ ID NO: 11764 - DNA, 23 bp, Artificial Sequence
  Synthetic
ccgttttttttttttatgtatgt

SEQ ID NO: 11765 - DNA, 23 bp, Artificial Sequence
  Synthetic
ccgttttttttttttaaccgatt

SEQ ID NO: 11766 - DNA, 23 bp, Artificial Sequence
  Synthetic
ccgttttttttttttaacactga

SEQ ID NO: 11767 - DNA, 23 bp, Artificial Sequence
  Synthetic
ccgttttttttttttaccgattt

SEQ ID NO: 11768 - DNA, 23 bp, Artificial Sequence
  Synthetic
ccgttttttttttttgaacacca

SEQ ID NO: 11769 - DNA, 23 bp, Artificial Sequence
  Synthetic
ccgttttttttttttgaagagag

SEQ ID NO: 11770 - DNA, 23 bp, Artificial Sequence
  Synthetic
ccgttttttttttttatgctttg

SEQ ID NO: 11771 - DNA, 23 bp, Artificial Sequence
  Synthetic
ccgttttttttttttgctgcaaa

SEQ ID NO: 11772 - DNA, 23 bp, Artificial Sequence
  Synthetic
ccgttttttttttttcttccagt

SEQ ID NO: 11773 - DNA, 23 bp, Artificial Sequence
  Synthetic
ccgttttttttttttagctgagt

SEQ ID NO: 11774 - DNA, 23 bp, Artificial Sequence
  Synthetic
ccgttttttttttttgctgagag

SEQ ID NO: 11775 - DNA, 23 bp, Artificial Sequence
  Synthetic
ccgttttttttttttcttccagt

SEQ ID NO: 11776 - DNA, 23 bp, Artificial Sequence
  Synthetic
ccgttttttttttttccagtcaa

SEQ ID NO: 11777 - DNA, 23 bp, Artificial Sequence
  Synthetic
ccgttttttttttttcagctatg

SEQ ID NO: 11778 - DNA, 23 bp, Artificial Sequence
  Synthetic
ccgttttttttttttgcaactta

SEQ ID NO: 11779 - DNA, 23 bp, Artificial Sequence
  Synthetic
ccgttttttttttttcgccctct

SEQ ID NO: 11780 - DNA, 23 bp, Artificial Sequence
  Synthetic
ccgttttttttttttgttgcagc

SEQ ID NO: 11781 - DNA, 23 bp, Artificial Sequence
  Synthetic
ccgttttttttttttagaggtcg

SEQ ID NO: 11782 - DNA, 23 bp, Artificial Sequence
  Synthetic
ccgttttttttttttccagcagc

SEQ ID NO: 11783 - DNA, 23 bp, Artificial Sequence
  Synthetic
ccgttttttttttttacaccaat

SEQ ID NO: 11784 - DNA, 23 bp, Artificial Sequence
  Synthetic
ccgttttttttttttacacttac

SEQ ID NO: 11785 - DNA, 23 bp, Artificial Sequence
  Synthetic
ccgttttttttttttactggagg

SEQ ID NO: 11786 - DNA, 23 bp, Artificial Sequence
  Synthetic
ccgttttttttttttaccctcat

SEQ ID NO: 11787 - DNA, 23 bp, Artificial Sequence
  Synthetic
ccgttttttttttttacggaagg

SEQ ID NO: 11788 - DNA, 23 bp, Artificial Sequence
  Synthetic
ccgttttttttttttaaaaaggt

SEQ ID NO: 11789 - DNA, 23 bp, Artificial Sequence
  Synthetic
ccgttttttttttttcaatgcaa

SEQ ID NO: 11790 - DNA, 23 bp, Artificial Sequence
  Synthetic
ccgttttttttttttctctgcag

SEQ ID NO: 11791 - DNA, 23 bp, Artificial Sequence
  Synthetic
ccgttttttttttttctaggata

SEQ ID NO: 11792 - DNA, 23 bp, Artificial Sequence
  Synthetic
ccgttttttttttttaaaagtaa

SEQ ID NO: 11793 - DNA, 23 bp, Artificial Sequence
  Synthetic
ccgttttttttttttacattttt

SEQ ID NO: 11794 - DNA, 23 bp, Artificial Sequence
  Synthetic
ccgttttttttttttagactaga

SEQ ID NO: 11795 - DNA, 23 bp, Artificial Sequence
  Synthetic
ccgttttttttttttaaaggcat

SEQ ID NO: 11796 - DNA, 23 bp, Artificial Sequence
  Synthetic
ccgttttttttttttcaacaaaa

SEQ ID NO: 11797 - DNA, 23 bp, Artificial Sequence
  Synthetic
ccgttttttttttttgagctcct

SEQ ID NO: 11798 - DNA, 23 bp, Artificial Sequence
  Synthetic
ccgttttttttttttggctataa

SEQ ID NO: 11799 - DNA, 23 bp, Artificial Sequence
  Synthetic
ccgttttttttttttactgaccg

SEQ ID NO: 11800 - DNA, 23 bp, Artificial Sequence
  Synthetic
ccgttttttttttttgacgggtg

SEQ ID NO: 11801 - DNA, 23 bp, Artificial Sequence
  Synthetic
ccgttttttttttttctgggcac

SEQ ID NO: 11802 - DNA, 23 bp, Artificial Sequence
  Synthetic
ccgttttttttttttacggtcag

SEQ ID NO: 11803 - DNA, 23 bp, Artificial Sequence
  Synthetic
ccgttttttttttttgcactgga

SEQ ID NO: 11804 - DNA, 23 bp, Artificial Sequence
  Synthetic
ccgttttttttttttagaggcag

SEQ ID NO: 11805 - DNA, 23 bp, Artificial Sequence
  Synthetic
ccgttttttttttttgggcgacc

SEQ ID NO: 11806 - DNA, 23 bp, Artificial Sequence
  Synthetic
ccgttttttttttttagaggtta

SEQ ID NO: 11807 - DNA, 23 bp, Artificial Sequence
  Synthetic
ccgttttttttttttaacaacca

SEQ ID NO: 11808 - DNA, 23 bp, Artificial Sequence
  Synthetic
ccgttttttttttttcaatcagc

SEQ ID NO: 11809 - DNA, 23 bp, Artificial Sequence
  Synthetic
ccgttttttttttttgcaatcag

SEQ ID NO: 11810 - DNA, 23 bp, Artificial Sequence
  Synthetic
ccgttttttttttttgtgaaagt

SEQ ID NO: 11811 - DNA, 23 bp, Artificial Sequence
  Synthetic
ccgttttttttttttcaggctca

SEQ ID NO: 11812 - DNA, 23 bp, Artificial Sequence
  Synthetic
ccgttttttttttttactatgca

SEQ ID NO: 11813 - DNA, 23 bp, Artificial Sequence
  Synthetic
ccgttttttttttttgtacccct

SEQ ID NO: 11814 - DNA, 23 bp, Artificial Sequence
  Synthetic
ccgttttttttttttacagatgg

SEQ ID NO: 11815 - DNA, 23 bp, Artificial Sequence
  Synthetic
ccgttttttttttttaaattgca

SEQ ID NO: 11816 - DNA, 23 bp, Artificial Sequence
  Synthetic
ccgttttttttttttataaggat

SEQ ID NO: 11817 - DNA, 23 bp, Artificial Sequence
  Synthetic
ccgttttttttttttaagatcaa

SEQ ID NO: 11818 - DNA, 23 bp, Artificial Sequence
  Synthetic
ccgttttttttttttcgaatata

SEQ ID NO: 11819 - DNA, 23 bp, Artificial Sequence
  Synthetic
ccgttttttttttttaaccaggt

SEQ ID NO: 11820 - DNA, 23 bp, Artificial Sequence
  Synthetic
ccgttttttttttttcacttagc

SEQ ID NO: 11821 - DNA, 23 bp, Artificial Sequence
  Synthetic
ccgttttttttttttcgtggatt

SEQ ID NO: 11822 - DNA, 23 bp, Artificial Sequence
  Synthetic
ccgttttttttttttctcataga

SEQ ID NO: 11823 - DNA, 23 bp, Artificial Sequence
  Synthetic
ccgttttttttttttagtggatg

SEQ ID NO: 11824 - DNA, 23 bp, Artificial Sequence
  Synthetic
ccgttttttttttttaaccatag

SEQ ID NO: 11825 - DNA, 23 bp, Artificial Sequence
  Synthetic
ccgttttttttttttcgtgaaat

SEQ ID NO: 11826 - DNA, 23 bp, Artificial Sequence
  Synthetic
ccgttttttttttttccaaaagt

SEQ ID NO: 11827 - DNA, 23 bp, Artificial Sequence
  Synthetic
ccgttttttttttttacacagga

SEQ ID NO: 11828 - DNA, 23 bp, Artificial Sequence
  Synthetic
ccgttttttttttttacgttcca

SEQ ID NO: 11829 - DNA, 23 bp, Artificial Sequence
  Synthetic
ccgttttttttttttgagagctt

SEQ ID NO: 11830 - DNA, 23 bp, Artificial Sequence
  Synthetic
ccgttttttttttttgaatccac

SEQ ID NO: 11831 - DNA, 23 bp, Artificial Sequence
  Synthetic
ccgttttttttttttaagtgttg

SEQ ID NO: 11832 - DNA, 23 bp, Artificial Sequence
  Synthetic
ccgttttttttttttagccacag

SEQ ID NO: 11833 - DNA, 23 bp, Artificial Sequence
  Synthetic
ccgttttttttttttggggttca

SEQ ID NO: 11834 - DNA, 23 bp, Artificial Sequence
  Synthetic
ccgttttttttttttcaaagttg

SEQ ID NO: 11835 - DNA, 23 bp, Artificial Sequence
  Synthetic
ccgttttttttttttacggctag

SEQ ID NO: 11836 - DNA, 23 bp, Artificial Sequence
  Synthetic
ccgttttttttttttcaacaaac

SEQ ID NO: 11837 - DNA, 23 bp, Artificial Sequence
  Synthetic
ccgttttttttttttgccttctg

SEQ ID NO: 11838 - DNA, 23 bp, Artificial Sequence
  Synthetic
ccgttttttttttttccaaaaca

SEQ ID NO: 11839 - DNA, 23 bp, Artificial Sequence
  Synthetic
ccgttttttttttttacggcatt

SEQ ID NO: 11840 - DNA, 23 bp, Artificial Sequence
  Synthetic
ccgttttttttttttgcatgacg

SEQ ID NO: 11841 - DNA, 23 bp, Artificial Sequence
  Synthetic
ccgttttttttttttacaccgag

SEQ ID NO: 11842 - DNA, 23 bp, Artificial Sequence
  Synthetic
ccgttttttttttttatgggaca

SEQ ID NO: 11843 - DNA, 23 bp, Artificial Sequence
  Synthetic
ccgttttttttttttaccagcta

SEQ ID NO: 11844 - DNA, 23 bp, Artificial Sequence
  Synthetic
ccgttttttttttttcattagga

SEQ ID NO: 11845 - DNA, 23 bp, Artificial Sequence
  Synthetic
ccgttttttttttttaactcagt

SEQ ID NO: 11846 - DNA, 23 bp, Artificial Sequence
  Synthetic
ccgttttttttttttacaagacg

SEQ ID NO: 11847 - DNA, 23 bp, Artificial Sequence
  Synthetic
ccgttttttttttttgaattcat

SEQ ID NO: 11848 - DNA, 23 bp, Artificial Sequence
  Synthetic
ccgttttttttttttagtggatg

SEQ ID NO: 11849 - DNA, 23 bp, Artificial Sequence
  Synthetic
ccgttttttttttttgctgccat

SEQ ID NO: 11850 - DNA, 23 bp, Artificial Sequence
  Synthetic
ccgttttttttttttctggcaca

SEQ ID NO: 11851 - DNA, 23 bp, Artificial Sequence
  Synthetic
ccgttttttttttttaggtttcc

SEQ ID NO: 11852 - DNA, 23 bp, Artificial Sequence
  Synthetic
ccgttttttttttttacaaacca

SEQ ID NO: 11853 - DNA, 23 bp, Artificial Sequence
  Synthetic
ccgttttttttttttaaacatca

SEQ ID NO: 11854 - DNA, 23 bp, Artificial Sequence
  Synthetic
ccgttttttttttttcacccagg

SEQ ID NO: 11855 - DNA, 23 bp, Artificial Sequence
  Synthetic
ccgttttttttttttcagtactg

SEQ ID NO: 11856 - DNA, 23 bp, Artificial Sequence
  Synthetic
ccgttttttttttttggaaacca

SEQ ID NO: 11857 - DNA, 23 bp, Artificial Sequence
  Synthetic
ccgttttttttttttacacacca

SEQ ID NO: 11858 - DNA, 23 bp, Artificial Sequence
  Synthetic
ccgttttttttttttccaggatc

SEQ ID NO: 11859 - DNA, 23 bp, Artificial Sequence
  Synthetic
ccgttttttttttttgtgaccaa

SEQ ID NO: 11860 - DNA, 23 bp, Artificial Sequence
  Synthetic
ccgttttttttttttcagttatc

SEQ ID NO: 11861 - DNA, 23 bp, Artificial Sequence
  Synthetic
ccgttttttttttttcgtgacat

SEQ ID NO: 11862 - DNA, 23 bp, Artificial Sequence
  Synthetic
ccgttttttttttttagaagtgc

SEQ ID NO: 11863 - DNA, 23 bp, Artificial Sequence
  Synthetic
ccgttttttttttttaggctggg

SEQ ID NO: 11864 - DNA, 23 bp, Artificial Sequence
  Synthetic
ccgttttttttttttaacaaaat

SEQ ID NO: 11865 - DNA, 23 bp, Artificial Sequence
  Synthetic
ccgttttttttttttatggcaga

SEQ ID NO: 11866 - DNA, 23 bp, Artificial Sequence
  Synthetic
ccgttttttttttttaacaaaat

SEQ ID NO: 11867 - DNA, 23 bp, Artificial Sequence
  Synthetic
ccgttttttttttttcatacagc

SEQ ID NO: 11868 - DNA, 23 bp, Artificial Sequence
  Synthetic
ccgttttttttttttcaggccgg

SEQ ID NO: 11869 - DNA, 23 bp, Artificial Sequence
  Synthetic
ccgttttttttttttctacctgc

SEQ ID NO: 11870 - DNA, 23 bp, Artificial Sequence
  Synthetic
ccgttttttttttttagcaaaaa

SEQ ID NO: 11871 - DNA, 23 bp, Artificial Sequence
  Synthetic
ccgttttttttttttaacaatac

SEQ ID NO: 11872 - DNA, 23 bp, Artificial Sequence
  Synthetic
ccgttttttttttttcacaagat

SEQ ID NO: 11873 - DNA, 23 bp, Artificial Sequence
  Synthetic
ccgttttttttttttcgcaaggt

SEQ ID NO: 11874 - DNA, 23 bp, Artificial Sequence
  Synthetic
ccgttttttttttttgtgctcac

SEQ ID NO: 11875 - DNA, 23 bp, Artificial Sequence
  Synthetic
ccgttttttttttttgtgctcac

SEQ ID NO: 11876 - DNA, 23 bp, Artificial Sequence
  Synthetic
ccgttttttttttttgtgctcac

SEQ ID NO: 11877 - DNA, 23 bp, Artificial Sequence
  Synthetic
ccgttttttttttttgtgctctc

SEQ ID NO: 11878 - DNA, 23 bp, Artificial Sequence
  Synthetic
ccgttttttttttttgtgctcgc

SEQ ID NO: 11879 - DNA, 23 bp, Artificial Sequence
  Synthetic
ccgttttttttttttcagagctc

SEQ ID NO: 11880 - DNA, 23 bp, Artificial Sequence
  Synthetic
ccgttttttttttttaggagctc

SEQ ID NO: 11881 - DNA, 23 bp, Artificial Sequence
  Synthetic
ccgttttttttttttggcataca

SEQ ID NO: 11882 - DNA, 23 bp, Artificial Sequence
  Synthetic
ccgttttttttttttggcataca

SEQ ID NO: 11883 - DNA, 23 bp, Artificial Sequence
  Synthetic
ccgttttttttttttggcataca

SEQ ID NO: 11884 - DNA, 23 bp, Artificial Sequence
  Synthetic
ccgttttttttttttggcataca

SEQ ID NO: 11885 - DNA, 23 bp, Artificial Sequence
  Synthetic
ccgttttttttttttggcataca

SEQ ID NO: 11886 - DNA, 23 bp, Artificial Sequence
  Synthetic
ccgttttttttttttgcacgtgc

SEQ ID NO: 11887 - DNA, 23 bp, Artificial Sequence
  Synthetic
ccgttttttttttttagcacgtg

SEQ ID NO: 11888 - DNA, 23 bp, Artificial Sequence
  Synthetic
ccgttttttttttttctcacgtg

SEQ ID NO: 11889 - DNA, 23 bp, Artificial Sequence
  Synthetic
ccgttttttttttttgggaatga

SEQ ID NO: 11890 - DNA, 23 bp, Artificial Sequence
  Synthetic
ccgttttttttttttgggaatga

SEQ ID NO: 11891 - DNA, 23 bp, Artificial Sequence
  Synthetic
ccgttttttttttttgggaatga

SEQ ID NO: 11892 - DNA, 23 bp, Artificial Sequence
  Synthetic
ccgttttttttttttgggaatga

SEQ ID NO: 11893 - DNA, 23 bp, Artificial Sequence
  Synthetic
ccgttttttttttttagggattg

SEQ ID NO: 11894 - DNA, 23 bp, Artificial Sequence
  Synthetic
ccgttttttttttttgaggaatg

SEQ ID NO: 11895 - DNA, 23 bp, Artificial Sequence
  Synthetic
ccgttttttttttttagggattg

SEQ ID NO: 11896 - DNA, 23 bp, Artificial Sequence
  Synthetic
ccgttttttttttttagatcatg

SEQ ID NO: 11897 - DNA, 23 bp, Artificial Sequence
  Synthetic
ccgttttttttttttagatcatg

SEQ ID NO: 11898 - DNA, 23 bp, Artificial Sequence
  Synthetic
ccgttttttttttttcagatcat

SEQ ID NO: 11899 - DNA, 23 bp, Artificial Sequence
  Synthetic
ccgttttttttttttcagatcat

SEQ ID NO: 11900 - DNA, 23 bp, Artificial Sequence
  Synthetic
ccgttttttttttttcagatcat

SEQ ID NO: 11901 - DNA, 23 bp, Artificial Sequence
  Synthetic
ccgttttttttttttcagatcat

SEQ ID NO: 11902 - DNA, 23 bp, Artificial Sequence
  Synthetic
ccgttttttttttttcagatcat

SEQ ID NO: 11903 - DNA, 23 bp, Artificial Sequence
  Synthetic
ccgttttttttttttgtcccgat

SEQ ID NO: 11904 - DNA, 23 bp, Artificial Sequence
  Synthetic
ccgttttttttttttcggcaagt

SEQ ID NO: 11905 - DNA, 23 bp, Artificial Sequence
  Synthetic
ccgttttttttttttccggcaag

SEQ ID NO: 11906 - DNA, 23 bp, Artificial Sequence
  Synthetic
ccgttttttttttttaggcaagt

SEQ ID NO: 11907 - DNA, 23 bp, Artificial Sequence
  Synthetic
ccgttttttttttttaggcaagt

SEQ ID NO: 11908 - DNA, 23 bp, Artificial Sequence
  Synthetic
ccgttttttttttttcaggcaag

SEQ ID NO: 11909 - DNA, 23 bp, Artificial Sequence
  Synthetic
ccgttttttttttttcaggcaag

SEQ ID NO: 11910 - DNA, 23 bp, Artificial Sequence
  Synthetic
ccgttttttttttttcaggcaag

SEQ ID NO: 11911 - DNA, 23 bp, Artificial Sequence
  Synthetic
ccgttttttttttttcaggcaag

SEQ ID NO: 11912 - DNA, 23 bp, Artificial Sequence
  Synthetic
ccgttttttttttttaggcaagt

SEQ ID NO: 11913 - DNA, 23 bp, Artificial Sequence
  Synthetic
ccgttttttttttttgatattgg

SEQ ID NO: 11914 - DNA, 23 bp, Artificial Sequence
  Synthetic
ccgttttttttttttgatattgg

SEQ ID NO: 11915 - DNA, 23 bp, Artificial Sequence
  Synthetic
ccgttttttttttttgatattgg

SEQ ID NO: 11916 - DNA, 23 bp, Artificial Sequence
  Synthetic
ccgttttttttttttgatattgg

SEQ ID NO: 11917 - DNA, 23 bp, Artificial Sequence
  Synthetic
ccgttttttttttttagtgatat

SEQ ID NO: 11918 - DNA, 23 bp, Artificial Sequence
  Synthetic
ccgttttttttttttagtgatat

SEQ ID NO: 11919 - DNA, 23 bp, Artificial Sequence
  Synthetic
ccgttttttttttttgcagcatc

SEQ ID NO: 11920 - DNA, 23 bp, Artificial Sequence
  Synthetic
ccgttttttttttttgcagcatc

SEQ ID NO: 11921 - DNA, 23 bp, Artificial Sequence
  Synthetic
ccgttttttttttttgcagcatc

SEQ ID NO: 11922 - DNA, 23 bp, Artificial Sequence
  Synthetic
ccgttttttttttttgcagcatc

SEQ ID NO: 11923 - DNA, 23 bp, Artificial Sequence
  Synthetic
ccgttttttttttttgtgcagca

SEQ ID NO: 11924 - DNA, 23 bp, Artificial Sequence
  Synthetic
ccgttttttttttttgggagcac

SEQ ID NO: 11925 - DNA, 23 bp, Artificial Sequence
  Synthetic
ccgttttttttttttgatcaatg

SEQ ID NO: 11926 - DNA, 23 bp, Artificial Sequence
  Synthetic
ccgttttttttttttggaggtgg

SEQ ID NO: 11927 - DNA, 23 bp, Artificial Sequence
  Synthetic
ccgttttttttttttggaggtgg

SEQ ID NO: 11928 - DNA, 23 bp, Artificial Sequence
  Synthetic
ccgttttttttttttgagttccc

SEQ ID NO: 11929 - DNA, 23 bp, Artificial Sequence
  Synthetic
ccgttttttttttttgagttccc

SEQ ID NO: 11930 - DNA, 23 bp, Artificial Sequence
  Synthetic
ccgttttttttttttgagttccc

SEQ ID NO: 11931 - DNA, 23 bp, Artificial Sequence
  Synthetic
ccgttttttttttttgagttccc

SEQ ID NO: 11932 - DNA, 23 bp, Artificial Sequence
  Synthetic
ccgttttttttttttgagttccc

SEQ ID NO: 11933 - DNA, 23 bp, Artificial Sequence
  Synthetic
ccgttttttttttttgagttccc

SEQ ID NO: 11934 - DNA, 23 bp, Artificial Sequence
  Synthetic
ccgttttttttttttcagttcaa

SEQ ID NO: 11935 - DNA, 23 bp, Artificial Sequence
  Synthetic
ccgttttttttttttcagttcaa

SEQ ID NO: 11936 - DNA, 23 bp, Artificial Sequence
  Synthetic
ccgttttttttttttaagttcaa

SEQ ID NO: 11937 - DNA, 23 bp, Artificial Sequence
  Synthetic
ccgttttttttttttcagggcaa

SEQ ID NO: 11938 - DNA, 23 bp, Artificial Sequence
  Synthetic
ccgttttttttttttcagggcag

SEQ ID NO: 11939 - DNA, 23 bp, Artificial Sequence
  Synthetic
ccgttttttttttttcagggcaa

SEQ ID NO: 11940 - DNA, 23 bp, Artificial Sequence
  Synthetic
ccgttttttttttttcagggcaa

SEQ ID NO: 11941 - DNA, 23 bp, Artificial Sequence
  Synthetic
ccgttttttttttttctgggcaa

SEQ ID NO: 11942 - DNA, 23 bp, Artificial Sequence
  Synthetic
ccgttttttttttttctgggcaa

SEQ ID NO: 11943 - DNA, 23 bp, Artificial Sequence
  Synthetic
ccgttttttttttttcggggcaa

SEQ ID NO: 11944 - DNA, 23 bp, Artificial Sequence
  Synthetic
ccgttttttttttttcagggcaa

SEQ ID NO: 11945 - DNA, 23 bp, Artificial Sequence
  Synthetic
ccgttttttttttttcagggcaa

SEQ ID NO: 11946 - DNA, 23 bp, Artificial Sequence
  Synthetic
ccgttttttttttttcacaagtt

SEQ ID NO: 11947 - DNA, 23 bp, Artificial Sequence
  Synthetic
ccgttttttttttttcttcagtt

SEQ ID NO: 11948 - DNA, 23 bp, Artificial Sequence
  Synthetic
ccgttttttttttttacaggagt

SEQ ID NO: 11949 - DNA, 23 bp, Artificial Sequence
  Synthetic
ccgttttttttttttgctacctg

SEQ ID NO: 11950 - DNA, 23 bp, Artificial Sequence
  Synthetic
ccgttttttttttttatctgcac

SEQ ID NO: 11951 - DNA, 23 bp, Artificial Sequence
  Synthetic
ccgttttttttttttcacaaatt

SEQ ID NO: 11952 - DNA, 23 bp, Artificial Sequence
  Synthetic
ccgttttttttttttcacaagtt

SEQ ID NO: 11953 - DNA, 23 bp, Artificial Sequence
  Synthetic
ccgttttttttttttagccaagc

SEQ ID NO: 11954 - DNA, 23 bp, Artificial Sequence
  Synthetic
ccgttttttttttttaaaagaga

SEQ ID NO: 11955 - DNA, 23 bp, Artificial Sequence
  Synthetic
ccgttttttttttttacagctgg

SEQ ID NO: 11956 - DNA, 23 bp, Artificial Sequence
  Synthetic
ccgttttttttttttgcagaagc

SEQ ID NO: 11957 - DNA, 23 bp, Artificial Sequence
  Synthetic
ccgttttttttttttcacaaacc

SEQ ID NO: 11958 - DNA, 23 bp, Artificial Sequence
  Synthetic
ccgttttttttttttcgccaata

SEQ ID NO: 11959 - DNA, 23 bp, Artificial Sequence
  Synthetic
ccgttttttttttttacaagtgc

SEQ ID NO: 11960 - DNA, 23 bp, Artificial Sequence
  Synthetic
ccgttttttttttttactacctg

SEQ ID NO: 11961 - DNA, 23 bp, Artificial Sequence
  Synthetic
ccgttttttttttttatctgcac

SEQ ID NO: 11962 - DNA, 23 bp, Artificial Sequence
  Synthetic
ccgttttttttttttactcaccg

SEQ ID NO: 11963 - DNA, 23 bp, Artificial Sequence
  Synthetic
ccgttttttttttttcagtgaat

SEQ ID NO: 11964 - DNA, 23 bp, Artificial Sequence
  Synthetic
ccgttttttttttttcgagctcc

SEQ ID NO: 11965 - DNA, 23 bp, Artificial Sequence
  Synthetic
ccgttttttttttttgaacaggt

SEQ ID NO: 11966 - DNA, 23 bp, Artificial Sequence
  Synthetic
ccgttttttttttttcagttttg

SEQ ID NO: 11967 - DNA, 23 bp, Artificial Sequence
  Synthetic
ccgttttttttttttcagttttg

SEQ ID NO: 11968 - DNA, 23 bp, Artificial Sequence
  Synthetic
ccgttttttttttttacctgcac

SEQ ID NO: 11969 - DNA, 23 bp, Artificial Sequence
  Synthetic
ccgttttttttttttaggcatag

SEQ ID NO: 11970 - DNA, 23 bp, Artificial Sequence
  Synthetic
ccgttttttttttttctgcctgt

SEQ ID NO: 11971 - DNA, 23 bp, Artificial Sequence
  Synthetic
ccgttttttttttttacatggtt

SEQ ID NO: 11972 - DNA, 23 bp, Artificial Sequence
  Synthetic
ccgttttttttttttacagttct

SEQ ID NO: 11973 - DNA, 23 bp, Artificial Sequence
  Synthetic
ccgttttttttttttggggtatt

SEQ ID NO: 11974 - DNA, 23 bp, Artificial Sequence
  Synthetic
ccgttttttttttttggaaatcc

SEQ ID NO: 11975 - DNA, 23 bp, Artificial Sequence
  Synthetic
ccgttttttttttttggcggaac

SEQ ID NO: 11976 - DNA, 23 bp, Artificial Sequence
  Synthetic
ccgttttttttttttctcaatag

SEQ ID NO: 11977 - DNA, 23 bp, Artificial Sequence
  Synthetic
ccgttttttttttttaaccgatt

SEQ ID NO: 11978 - DNA, 23 bp, Artificial Sequence
  Synthetic
ccgttttttttttttactgattt

SEQ ID NO: 11979 - DNA, 23 bp, Artificial Sequence
  Synthetic
ccgttttttttttttgcaactta

SEQ ID NO: 11980 - DNA, 23 bp, Artificial Sequence
  Synthetic
ccgttttttttttttacaaccag

SEQ ID NO: 11981 - DNA, 23 bp, Artificial Sequence
  Synthetic
ccgttttttttttttaacaaaat

SEQ ID NO: 11982 - DNA, 23 bp, Artificial Sequence
  Synthetic
ccgttttttttttttacaggccg

SEQ ID NO: 11983 - DNA, 23 bp, Artificial Sequence
  Synthetic
ccgttttttttttttctacctgc

SEQ ID NO: 11984 - DNA, 23 bp, Artificial Sequence
  Synthetic
ccgttttttttttttgctcaata

SEQ ID NO: 11985 - DNA, 23 bp, Artificial Sequence
  Synthetic
ccgttttttttttttgcaaaaat

SEQ ID NO: 11986 - DNA, 23 bp, Artificial Sequence
  Synthetic
ccgttttttttttttccagcttt

SEQ ID NO: 11987 - DNA, 23 bp, Artificial Sequence
  Synthetic
ccgttttttttttttatcagctt

SEQ ID NO: 11988 - DNA, 23 bp, Artificial Sequence
  Synthetic
ccgttttttttttttaaaagctt

SEQ ID NO: 11989 - DNA, 23 bp, Artificial Sequence
  Synthetic
ccgttttttttttttagtcatcc

SEQ ID NO: 11990 - DNA, 23 bp, Artificial Sequence
  Synthetic
ccgttttttttttttagtcatcc

SEQ ID NO: 11991 - DNA, 23 bp, Artificial Sequence
  Synthetic
ccgttttttttttttgagaagac

SEQ ID NO: 11992 - DNA, 23 bp, Artificial Sequence
  Synthetic
ccgttttttttttttaacctttt

SEQ ID NO: 11993 - DNA, 23 bp, Artificial Sequence
  Synthetic
ccgttttttttttttacacagtc

SEQ ID NO: 11994 - DNA, 23 bp, Artificial Sequence
  Synthetic
ccgttttttttttttcaaactcg

SEQ ID NO: 11995 - DNA, 23 bp, Artificial Sequence
  Synthetic
ccgttttttttttttcaccttga

SEQ ID NO: 11996 - DNA, 23 bp, Artificial Sequence
  Synthetic
ccgttttttttttttcgactcct

SEQ ID NO: 11997 - DNA, 23 bp, Artificial Sequence
  Synthetic
ccgttttttttttttaagcattc

SEQ ID NO: 11998 - DNA, 23 bp, Artificial Sequence
  Synthetic
ccgttttttttttttcagcattc

SEQ ID NO: 11999 - DNA, 23 bp, Artificial Sequence
  Synthetic
ccgttttttttttttggcattca

SEQ ID NO: 12000 - DNA, 23 bp, Artificial Sequence
  Synthetic
ccgttttttttttttacaaaggt

SEQ ID NO: 12001 - DNA, 23 bp, Artificial Sequence
  Synthetic
ccgttttttttttttatgcagtc

SEQ ID NO: 12002 - DNA, 23 bp, Artificial Sequence
  Synthetic
ccgttttttttttttatcctgat

SEQ ID NO: 12003 - DNA, 23 bp, Artificial Sequence
  Synthetic
ccgttttttttttttaggcatat

SEQ ID NO: 12004 - DNA, 23 bp, Artificial Sequence
  Synthetic
ccgttttttttttttgctcttta

SEQ ID NO: 12005 - DNA, 23 bp, Artificial Sequence
  Synthetic
ccgttttttttttttgctggttg

SEQ ID NO: 12006 - DNA, 23 bp, Artificial Sequence
  Synthetic
ccgttttttttttttccttagca

SEQ ID NO: 12007 - DNA, 23 bp, Artificial Sequence
  Synthetic
ccgttttttttttttcaccaatt

SEQ ID NO: 12008 - DNA, 23 bp, Artificial Sequence
  Synthetic
ccgttttttttttttggatatgc

SEQ ID NO: 12009 - DNA, 23 bp, Artificial Sequence
  Synthetic
ccgttttttttttttcaccaata

SEQ ID NO: 12010 - DNA, 23 bp, Artificial Sequence
  Synthetic
ccgttttttttttttacacgata

SEQ ID NO: 12011 - DNA, 23 bp, Artificial Sequence
  Synthetic
ccgttttttttttttatgcatat

SEQ ID NO: 12012 - DNA, 23 bp, Artificial Sequence
  Synthetic
ccgttttttttttttgaccataa

SEQ ID NO: 12013 - DNA, 23 bp, Artificial Sequence
  Synthetic
ccgttttttttttttgacactat

SEQ ID NO: 12014 - DNA, 23 bp, Artificial Sequence
  Synthetic
ccgttttttttttttgagaactg

SEQ ID NO: 12015 - DNA, 23 bp, Artificial Sequence
  Synthetic
ccgttttttttttttgtcatatc

SEQ ID NO: 12016 - DNA, 23 bp, Artificial Sequence
  Synthetic
ccgttttttttttttcttggcca

SEQ ID NO: 12017 - DNA, 23 bp, Artificial Sequence
  Synthetic
ccgttttttttttttgaagctgc

SEQ ID NO: 12018 - DNA, 23 bp, Artificial Sequence
  Synthetic
ccgttttttttttttatcatacc

SEQ ID NO: 12019 - DNA, 23 bp, Artificial Sequence
  Synthetic
ccgttttttttttttcttggcca

SEQ ID NO: 12020 - DNA, 23 bp, Artificial Sequence
  Synthetic
ccgttttttttttttcgaatgtt

SEQ ID NO: 12021 - DNA, 23 bp, Artificial Sequence
  Synthetic
ccgttttttttttttgaagagca

SEQ ID NO: 12022 - DNA, 23 bp, Artificial Sequence
  Synthetic
ccgttttttttttttacctcatg

SEQ ID NO: 12023 - DNA, 23 bp, Artificial Sequence
  Synthetic
ccgttttttttttttagcgttcc

SEQ ID NO: 12024 - DNA, 23 bp, Artificial Sequence
  Synthetic
ccgttttttttttttatatcaca

SEQ ID NO: 12025 - DNA, 23 bp, Artificial Sequence
  Synthetic
ccgttttttttttttatctcatc

SEQ ID NO: 12026 - DNA, 23 bp, Artificial Sequence
  Synthetic
ccgttttttttttttctgacaac

SEQ ID NO: 12027 - DNA, 23 bp, Artificial Sequence
  Synthetic
ccgttttttttttttagatcatc

SEQ ID NO: 12028 - DNA, 23 bp, Artificial Sequence
  Synthetic
ccgttttttttttttggacatca

SEQ ID NO: 12029 - DNA, 23 bp, Artificial Sequence
  Synthetic
ccgttttttttttttcagttatg

SEQ ID NO: 12030 - DNA, 23 bp, Artificial Sequence
  Synthetic
ccgttttttttttttcagctatg

SEQ ID NO: 12031 - DNA, 23 bp, Artificial Sequence
  Synthetic
ccgttttttttttttaatgaatg

SEQ ID NO: 12032 - DNA, 23 bp, Artificial Sequence
  Synthetic
ccgttttttttttttaaaccaag

SEQ ID NO: 12033 - DNA, 23 bp, Artificial Sequence
  Synthetic
ccgttttttttttttacagtaag

SEQ ID NO: 12034 - DNA, 23 bp, Artificial Sequence
  Synthetic
ccgttttttttttttaccctcgt

SEQ ID NO: 12035 - DNA, 23 bp, Artificial Sequence
  Synthetic
ccgttttttttttttatctcact

SEQ ID NO: 12036 - DNA, 23 bp, Artificial Sequence
  Synthetic
ccgttttttttttttgtcccact

SEQ ID NO: 12037 - DNA, 23 bp, Artificial Sequence
  Synthetic
ccgttttttttttttcgaaaaac

SEQ ID NO: 12038 - DNA, 23 bp, Artificial Sequence
  Synthetic
ccgttttttttttttatctcact

SEQ ID NO: 12039 - DNA, 23 bp, Artificial Sequence
  Synthetic
ccgttttttttttttacacagct

SEQ ID NO: 12040 - DNA, 23 bp, Artificial Sequence
  Synthetic
ccgttttttttttttatcccgat

SEQ ID NO: 12041 - DNA, 23 bp, Artificial Sequence
  Synthetic
ccgttttttttttttacttcaat

SEQ ID NO: 12042 - DNA, 23 bp, Artificial Sequence
  Synthetic
ccgttttttttttttctcattac

SEQ ID NO: 12043 - DNA, 23 bp, Artificial Sequence
  Synthetic
ccgttttttttttttaccaccga

SEQ ID NO: 12044 - DNA, 23 bp, Artificial Sequence
  Synthetic
ccgttttttttttttagaactgg

SEQ ID NO: 12045 - DNA, 23 bp, Artificial Sequence
  Synthetic
ccgttttttttttttgtcatggc

SEQ ID NO: 12046 - DNA, 23 bp, Artificial Sequence
  Synthetic
ccgttttttttttttaaaccacc

SEQ ID NO: 12047 - DNA, 23 bp, Artificial Sequence
  Synthetic
ccgttttttttttttgagatcac

SEQ ID NO: 12048 - DNA, 23 bp, Artificial Sequence
  Synthetic
ccgttttttttttttagtaataa

SEQ ID NO: 12049 - DNA, 23 bp, Artificial Sequence
  Synthetic
ccgttttttttttttggtgaaat

SEQ ID NO: 12050 - DNA, 23 bp, Artificial Sequence
  Synthetic
ccgttttttttttttcatccaaa

SEQ ID NO: 12051 - DNA, 23 bp, Artificial Sequence
  Synthetic
ccgttttttttttttgcactttg

SEQ ID NO: 12052 - DNA, 23 bp, Artificial Sequence
  Synthetic
ccgttttttttttttcaactaaa

SEQ ID NO: 12053 - DNA, 23 bp, Artificial Sequence
  Synthetic
ccgttttttttttttacaacgaa

SEQ ID NO: 12054 - DNA, 23 bp, Artificial Sequence
  Synthetic
ccgttttttttttttcagcaaat

SEQ ID NO: 12055 - DNA, 23 bp, Artificial Sequence
  Synthetic
ccgttttttttttttggcatcgt

SEQ ID NO: 12056 - DNA, 23 bp, Artificial Sequence
  Synthetic
ccgttttttttttttacacttga

SEQ ID NO: 12057 - DNA, 23 bp, Artificial Sequence
  Synthetic
ccgttttttttttttctcatttg

SEQ ID NO: 12058 - DNA, 23 bp, Artificial Sequence
  Synthetic
ccgttttttttttttgataatta

SEQ ID NO: 12059 - DNA, 23 bp, Artificial Sequence
  Synthetic
ccgttttttttttttgtgctcac

SEQ ID NO: 12060 - DNA, 23 bp, Artificial Sequence
  Synthetic
ccgttttttttttttcagagctc

SEQ ID NO: 12061 - DNA, 23 bp, Artificial Sequence
  Synthetic
ccgttttttttttttcagagctc

SEQ ID NO: 12062 - DNA, 23 bp, Artificial Sequence
  Synthetic
ccgttttttttttttaggagctc

SEQ ID NO: 12063 - DNA, 23 bp, Artificial Sequence
  Synthetic
ccgttttttttttttcagagctc

SEQ ID NO: 12064 - DNA, 23 bp, Artificial Sequence
  Synthetic
ccgttttttttttttaagagctc

SEQ ID NO: 12065 - DNA, 23 bp, Artificial Sequence
  Synthetic
ccgttttttttttttcagatcat

SEQ ID NO: 12066 - DNA, 23 bp, Artificial Sequence
  Synthetic
ccgttttttttttttcagatcat

SEQ ID NO: 12067 - DNA, 23 bp, Artificial Sequence
  Synthetic
ccgttttttttttttgtcccgat

SEQ ID NO: 12068 - DNA, 23 bp, Artificial Sequence
  Synthetic
ccgttttttttttttgtcccgat

SEQ ID NO: 12069 - DNA, 23 bp, Artificial Sequence
  Synthetic
ccgttttttttttttcagttcaa

SEQ ID NO: 12070 - DNA, 23 bp, Artificial Sequence
  Synthetic
ccgttttttttttttgccaggga

SEQ ID NO: 12071 - DNA, 23 bp, Artificial Sequence
  Synthetic
ccgttttttttttttgccaggga

SEQ ID NO: 12072 - DNA, 23 bp, Artificial Sequence
  Synthetic
ccgttttttttttttgccaggga

SEQ ID NO: 12073 - DNA, 23 bp, Artificial Sequence
  Synthetic
ccgttttttttttttgccaggga

SEQ ID NO: 12074 - DNA, 23 bp, Artificial Sequence
  Synthetic
ccgttttttttttttgccaggga

SEQ ID NO: 12075 - DNA, 23 bp, Artificial Sequence
  Synthetic
ccgttttttttttttaaccatac

SEQ ID NO: 12076 - DNA, 23 bp, Artificial Sequence
  Synthetic
ccgttttttttttttaactatac

SEQ ID NO: 12077 - DNA, 23 bp, Artificial Sequence
  Synthetic
ccgttttttttttttagcacaaa

SEQ ID NO: 12078 - DNA, 23 bp, Artificial Sequence
  Synthetic
ccgttttttttttttcatagccc

SEQ ID NO: 12079 - DNA, 23 bp, Artificial Sequence
  Synthetic
ccgttttttttttttacaggagt

SEQ ID NO: 12080 - DNA, 23 bp, Artificial Sequence
  Synthetic
ccgttttttttttttcaaggagt

SEQ ID NO: 12081 - DNA, 23 bp, Artificial Sequence
  Synthetic
ccgttttttttttttgctacctg

SEQ ID NO: 12082 - DNA, 23 bp, Artificial Sequence
  Synthetic
ccgttttttttttttgatagccc

SEQ ID NO: 12083 - DNA, 23 bp, Artificial Sequence
  Synthetic
ccgttttttttttttacaaacac

SEQ ID NO: 12084 - DNA, 23 bp, Artificial Sequence
  Synthetic
ccgttttttttttttggcattca

SEQ ID NO: 12085 - DNA, 23 bp, Artificial Sequence
  Synthetic
ccgttttttttttttcacaagtt

SEQ ID NO: 12086 - DNA, 23 bp, Artificial Sequence
  Synthetic
ccgttttttttttttaaaagaga

SEQ ID NO: 12087 - DNA, 23 bp, Artificial Sequence
  Synthetic
ccgttttttttttttcacatagg

SEQ ID NO: 12088 - DNA, 23 bp, Artificial Sequence
  Synthetic
ccgttttttttttttccatcatc

SEQ ID NO: 12089 - DNA, 23 bp, Artificial Sequence
  Synthetic
ccgttttttttttttagacacgt

SEQ ID NO: 12090 - DNA, 23 bp, Artificial Sequence
  Synthetic
ccgttttttttttttctaccata

SEQ ID NO: 12091 - DNA, 23 bp, Artificial Sequence
  Synthetic
ccgttttttttttttaagggatt

SEQ ID NO: 12092 - DNA, 23 bp, Artificial Sequence
  Synthetic
ccgttttttttttttacaaagtt

SEQ ID NO: 12093 - DNA, 23 bp, Artificial Sequence
  Synthetic
ccgttttttttttttcacttttg

SEQ ID NO: 12094 - DNA, 23 bp, Artificial Sequence
  Synthetic
ccgttttttttttttgtaaacca

SEQ ID NO: 12095 - DNA, 23 bp, Artificial Sequence
  Synthetic
ccgttttttttttttatctgcac

SEQ ID NO: 12096 - DNA, 23 bp, Artificial Sequence
  Synthetic
ccgttttttttttttaacccacc

SEQ ID NO: 12097 - DNA, 23 bp, Artificial Sequence
  Synthetic
ccgttttttttttttactcaccg

SEQ ID NO: 12098 - DNA, 23 bp, Artificial Sequence
  Synthetic
ccgttttttttttttcagtgaat

SEQ ID NO: 12099 - DNA, 23 bp, Artificial Sequence
  Synthetic
ccgttttttttttttacccttat

SEQ ID NO: 12100 - DNA, 23 bp, Artificial Sequence
  Synthetic
ccgttttttttttttaagcccaa

SEQ ID NO: 12101 - DNA, 23 bp, Artificial Sequence
  Synthetic
ccgttttttttttttccaacaac

SEQ ID NO: 12102 - DNA, 23 bp, Artificial Sequence
  Synthetic
ccgttttttttttttcagttttg

SEQ ID NO: 12103 - DNA, 23 bp, Artificial Sequence
  Synthetic
ccgttttttttttttacctgcac

SEQ ID NO: 12104 - DNA, 23 bp, Artificial Sequence
  Synthetic
ccgttttttttttttaggcatag

SEQ ID NO: 12105 - DNA, 23 bp, Artificial Sequence
  Synthetic
ccgttttttttttttcagactcc

SEQ ID NO: 12106 - DNA, 23 bp, Artificial Sequence
  Synthetic
ccgttttttttttttcaacatca

SEQ ID NO: 12107 - DNA, 23 bp, Artificial Sequence
  Synthetic
ccgttttttttttttctgcctgt

SEQ ID NO: 12108 - DNA, 23 bp, Artificial Sequence
  Synthetic
ccgttttttttttttcacagttg

SEQ ID NO: 12109 - DNA, 23 bp, Artificial Sequence
  Synthetic
ccgttttttttttttatccaatc

SEQ ID NO: 12110 - DNA, 23 bp, Artificial Sequence
  Synthetic
ccgttttttttttttaaacggaa

SEQ ID NO: 12111 - DNA, 23 bp, Artificial Sequence
  Synthetic
ccgttttttttttttggaaatcc

SEQ ID NO: 12112 - DNA, 23 bp, Artificial Sequence
  Synthetic
ccgttttttttttttctgttcct

SEQ ID NO: 12113 - DNA, 23 bp, Artificial Sequence
  Synthetic
ccgttttttttttttagcctatc

SEQ ID NO: 12114 - DNA, 23 bp, Artificial Sequence
  Synthetic
ccgttttttttttttgcggaact

SEQ ID NO: 12115 - DNA, 23 bp, Artificial Sequence
  Synthetic
ccgttttttttttttctcaatag

SEQ ID NO: 12116 - DNA, 23 bp, Artificial Sequence
  Synthetic
ccgttttttttttttactgattt

SEQ ID NO: 12117 - DNA, 23 bp, Artificial Sequence
  Synthetic
ccgttttttttttttaaccgatt

SEQ ID NO: 12118 - DNA, 23 bp, Artificial Sequence
  Synthetic
ccgttttttttttttgctttgac

SEQ ID NO: 12119 - DNA, 23 bp, Artificial Sequence
  Synthetic
ccgttttttttttttgctgagag

SEQ ID NO: 12120 - DNA, 23 bp, Artificial Sequence
  Synthetic
ccgttttttttttttgcaactta

SEQ ID NO: 12121 - DNA, 23 bp, Artificial Sequence
  Synthetic
ccgttttttttttttagaggtcg

SEQ ID NO: 12122 - DNA, 23 bp, Artificial Sequence
  Synthetic
ccgttttttttttttacacttac

SEQ ID NO: 12123 - DNA, 23 bp, Artificial Sequence
  Synthetic
ccgttttttttttttctggagga

SEQ ID NO: 12124 - DNA, 23 bp, Artificial Sequence
  Synthetic
ccgttttttttttttaacaaaat

SEQ ID NO: 12125 - DNA, 23 bp, Artificial Sequence
  Synthetic
ccgttttttttttttcatacagc

SEQ ID NO: 12126 - DNA, 23 bp, Artificial Sequence
  Synthetic
ccgttttttttttttcatacagc

SEQ ID NO: 12127 - DNA, 23 bp, Artificial Sequence
  Synthetic
ccgttttttttttttgctcaata

SEQ ID NO: 12128 - DNA, 23 bp, Artificial Sequence
  Synthetic
ccgttttttttttttactcaggg

SEQ ID NO: 12129 - DNA, 23 bp, Artificial Sequence
  Synthetic
ccgttttttttttttaaggctca

SEQ ID NO: 12130 - DNA, 23 bp, Artificial Sequence
  Synthetic
ccgttttttttttttaactatac

SEQ ID NO: 12131 - DNA, 23 bp, Artificial Sequence
  Synthetic
ccgttttttttttttaaccacac

SEQ ID NO: 12132 - DNA, 23 bp, Artificial Sequence
  Synthetic
ccgttttttttttttaaccatac

SEQ ID NO: 12133 - DNA, 23 bp, Artificial Sequence
  Synthetic
ccgttttttttttttaactattc

SEQ ID NO: 12134 - DNA, 23 bp, Artificial Sequence
  Synthetic
ccgttttttttttttaactatac

SEQ ID NO: 12135 - DNA, 23 bp, Artificial Sequence
  Synthetic
ccgttttttttttttaacaacac

SEQ ID NO: 12136 - DNA, 23 bp, Artificial Sequence
  Synthetic
ccgttttttttttttaacagcac

SEQ ID NO: 12137 - DNA, 23 bp, Artificial Sequence
  Synthetic
ccgttttttttttttaactgtac

SEQ ID NO: 12138 - DNA, 23 bp, Artificial Sequence
  Synthetic
ccgttttttttttttatacatac

SEQ ID NO: 12139 - DNA, 23 bp, Artificial Sequence
  Synthetic
ccgttttttttttttcacaagtt

SEQ ID NO: 12140 - DNA, 23 bp, Artificial Sequence
  Synthetic
ccgttttttttttttcttcagtt

SEQ ID NO: 12141 - DNA, 23 bp, Artificial Sequence
  Synthetic
ccgttttttttttttcttcagtt

SEQ ID NO: 12142 - DNA, 23 bp, Artificial Sequence
  Synthetic
ccgttttttttttttcatagccc

SEQ ID NO: 12143 - DNA, 23 bp, Artificial Sequence
  Synthetic
ccgttttttttttttgatagccc

SEQ ID NO: 12144 - DNA, 23 bp, Artificial Sequence
  Synthetic
ccgttttttttttttcacaaatt

SEQ ID NO: 12145 - DNA, 23 bp, Artificial Sequence
  Synthetic
ccgttttttttttttacaaatcc

SEQ ID NO: 12146 - DNA, 23 bp, Artificial Sequence
  Synthetic
ccgttttttttttttcacacaca

SEQ ID NO: 12147 - DNA, 23 bp, Artificial Sequence
  Synthetic
ccgttttttttttttcaaacacc

SEQ ID NO: 12148 - DNA, 23 bp, Artificial Sequence
  Synthetic
ccgttttttttttttggcattca

SEQ ID NO: 12149 - DNA, 23 bp, Artificial Sequence
  Synthetic
ccgttttttttttttcacaggtt

SEQ ID NO: 12150 - DNA, 23 bp, Artificial Sequence
  Synthetic
ccgttttttttttttcacaagtt

SEQ ID NO: 12151 - DNA, 23 bp, Artificial Sequence
  Synthetic
ccgttttttttttttgcattatt

SEQ ID NO: 12152 - DNA, 23 bp, Artificial Sequence
  Synthetic
ccgttttttttttttaaaagaga

SEQ ID NO: 12153 - DNA, 23 bp, Artificial Sequence
  Synthetic
ccgttttttttttttagcaagcc

SEQ ID NO: 12154 - DNA, 23 bp, Artificial Sequence
  Synthetic
ccgttttttttttttatgccctt

SEQ ID NO: 12155 - DNA, 23 bp, Artificial Sequence
  Synthetic
ccgttttttttttttcgaccatg

SEQ ID NO: 12156 - DNA, 23 bp, Artificial Sequence
  Synthetic
ccgttttttttttttcagctggt

SEQ ID NO: 12157 - DNA, 23 bp, Artificial Sequence
  Synthetic
ccgttttttttttttcacatagg

SEQ ID NO: 12158 - DNA, 23 bp, Artificial Sequence
  Synthetic
ccgttttttttttttcagatagg

SEQ ID NO: 12159 - DNA, 23 bp, Artificial Sequence
  Synthetic
ccgttttttttttttacgcgtat

SEQ ID NO: 12160 - DNA, 23 bp, Artificial Sequence
  Synthetic
ccgttttttttttttggcctgat

SEQ ID NO: 12161 - DNA, 23 bp, Artificial Sequence
  Synthetic
ccgttttttttttttctaccata

SEQ ID NO: 12162 - DNA, 23 bp, Artificial Sequence
  Synthetic
ccgttttttttttttagtagtgc

SEQ ID NO: 12163 - DNA, 23 bp, Artificial Sequence
  Synthetic
ccgttttttttttttagtagtgc

SEQ ID NO: 12164 - DNA, 23 bp, Artificial Sequence
  Synthetic
ccgttttttttttttagtacatc

SEQ ID NO: 12165 - DNA, 23 bp, Artificial Sequence
  Synthetic
ccgttttttttttttacaaagtt

SEQ ID NO: 12166 - DNA, 23 bp, Artificial Sequence
  Synthetic
ccgttttttttttttacaaagtt

SEQ ID NO: 12167 - DNA, 23 bp, Artificial Sequence
  Synthetic
ccgttttttttttttgatcactt

SEQ ID NO: 12168 - DNA, 23 bp, Artificial Sequence
  Synthetic
ccgttttttttttttgctcattt

SEQ ID NO: 12169 - DNA, 23 bp, Artificial Sequence
  Synthetic
ccgttttttttttttcacaaacc

SEQ ID NO: 12170 - DNA, 23 bp, Artificial Sequence
  Synthetic
ccgttttttttttttacaaacca

SEQ ID NO: 12171 - DNA, 23 bp, Artificial Sequence
  Synthetic
ccgttttttttttttctccaata

SEQ ID NO: 12172 - DNA, 23 bp, Artificial Sequence
  Synthetic
ccgttttttttttttacctgcac

SEQ ID NO: 12173 - DNA, 23 bp, Artificial Sequence
  Synthetic
ccgttttttttttttatctgcac

SEQ ID NO: 12174 - DNA, 23 bp, Artificial Sequence
  Synthetic
ccgttttttttttttactcaccg

SEQ ID NO: 12175 - DNA, 23 bp, Artificial Sequence
  Synthetic
ccgttttttttttttggtacaat

SEQ ID NO: 12176 - DNA, 23 bp, Artificial Sequence
  Synthetic
ccgttttttttttttcccaccga

SEQ ID NO: 12177 - DNA, 23 bp, Artificial Sequence
  Synthetic
ccgttttttttttttagttggca

SEQ ID NO: 12178 - DNA, 23 bp, Artificial Sequence
  Synthetic
ccgttttttttttttcagtgaat

SEQ ID NO: 12179 - DNA, 23 bp, Artificial Sequence
  Synthetic
ccgttttttttttttcccttatc

SEQ ID NO: 12180 - DNA, 23 bp, Artificial Sequence
  Synthetic
ccgttttttttttttggctgcaa

SEQ ID NO: 12181 - DNA, 23 bp, Artificial Sequence
  Synthetic
ccgttttttttttttacctaata

SEQ ID NO: 12182 - DNA, 23 bp, Artificial Sequence
  Synthetic
ccgttttttttttttggctgtca

SEQ ID NO: 12183 - DNA, 23 bp, Artificial Sequence
  Synthetic
ccgttttttttttttactgggac

SEQ ID NO: 12184 - DNA, 23 bp, Artificial Sequence
  Synthetic
ccgttttttttttttccacatgg

SEQ ID NO: 12185 - DNA, 23 bp, Artificial Sequence
  Synthetic
ccgttttttttttttcccaacaa

SEQ ID NO: 12186 - DNA, 23 bp, Artificial Sequence
  Synthetic
ccgttttttttttttcccaacaa

SEQ ID NO: 12187 - DNA, 23 bp, Artificial Sequence
  Synthetic
ccgttttttttttttgaacaggt

SEQ ID NO: 12188 - DNA, 23 bp, Artificial Sequence
  Synthetic
ccgttttttttttttcagttttg

SEQ ID NO: 12189 - DNA, 23 bp, Artificial Sequence
  Synthetic
ccgttttttttttttcagttttg

SEQ ID NO: 12190 - DNA, 23 bp, Artificial Sequence
  Synthetic
ccgttttttttttttctacctgc

SEQ ID NO: 12191 - DNA, 23 bp, Artificial Sequence
  Synthetic
ccgttttttttttttacatcgtt

SEQ ID NO: 12192 - DNA, 23 bp, Artificial Sequence
  Synthetic
ccgttttttttttttcatcatta

SEQ ID NO: 12193 - DNA, 23 bp, Artificial Sequence
  Synthetic
ccgttttttttttttcccatgcc

SEQ ID NO: 12194 - DNA, 23 bp, Artificial Sequence
  Synthetic
ccgttttttttttttcaagtggt

SEQ ID NO: 12195 - DNA, 23 bp, Artificial Sequence
  Synthetic
ccgttttttttttttaggcatag

SEQ ID NO: 12196 - DNA, 23 bp, Artificial Sequence
  Synthetic
ccgttttttttttttaggcatag

SEQ ID NO: 12197 - DNA, 23 bp, Artificial Sequence
  Synthetic
ccgttttttttttttcagactcc

SEQ ID NO: 12198 - DNA, 23 bp, Artificial Sequence
  Synthetic
ccgttttttttttttgccaacac

SEQ ID NO: 12199 - DNA, 23 bp, Artificial Sequence
  Synthetic
ccgttttttttttttagccgctg

SEQ ID NO: 12200 - DNA, 23 bp, Artificial Sequence
  Synthetic
ccgttttttttttttagccatga

SEQ ID NO: 12201 - DNA, 23 bp, Artificial Sequence
  Synthetic
ccgttttttttttttctgcctgt

SEQ ID NO: 12202 - DNA, 23 bp, Artificial Sequence
  Synthetic
ccgttttttttttttcacagttg

SEQ ID NO: 12203 - DNA, 23 bp, Artificial Sequence
  Synthetic
ccgttttttttttttcacagttg

SEQ ID NO: 12204 - DNA, 23 bp, Artificial Sequence
  Synthetic
ccgttttttttttttccaatcag

SEQ ID NO: 12205 - DNA, 23 bp, Artificial Sequence
  Synthetic
ccgttttttttttttcacatggt

SEQ ID NO: 12206 - DNA, 23 bp, Artificial Sequence
  Synthetic
ccgttttttttttttgcatggtt

SEQ ID NO: 12207 - DNA, 23 bp, Artificial Sequence
  Synthetic
ccgttttttttttttaagaattg

SEQ ID NO: 12208 - DNA, 23 bp, Artificial Sequence
  Synthetic
ccgttttttttttttgaaaccca

SEQ ID NO: 12209 - DNA, 23 bp, Artificial Sequence
  Synthetic
ccgttttttttttttgagaccca

SEQ ID NO: 12210 - DNA, 23 bp, Artificial Sequence
  Synthetic
ccgttttttttttttggggtatt

SEQ ID NO: 12211 - DNA, 23 bp, Artificial Sequence
  Synthetic
ccgttttttttttttacagttct

SEQ ID NO: 12212 - DNA, 23 bp, Artificial Sequence
  Synthetic
ccgttttttttttttacagctct

SEQ ID NO: 12213 - DNA, 23 bp, Artificial Sequence
  Synthetic
ccgttttttttttttggaaatcc

SEQ ID NO: 12214 - DNA, 23 bp, Artificial Sequence
  Synthetic
ccgttttttttttttggtaatcc

SEQ ID NO: 12215 - DNA, 23 bp, Artificial Sequence
  Synthetic
ccgttttttttttttctgttcct

SEQ ID NO: 12216 - DNA, 23 bp, Artificial Sequence
  Synthetic
ccgttttttttttttcagaccga

SEQ ID NO: 12217 - DNA, 23 bp, Artificial Sequence
  Synthetic
ccgttttttttttttagcctatc

SEQ ID NO: 12218 - DNA, 23 bp, Artificial Sequence
  Synthetic
ccgttttttttttttgcagaact

SEQ ID NO: 12219 - DNA, 23 bp, Artificial Sequence
  Synthetic
ccgttttttttttttgcagaact

SEQ ID NO: 12220 - DNA, 23 bp, Artificial Sequence
  Synthetic
ccgttttttttttttcactgaac

SEQ ID NO: 12221 - DNA, 23 bp, Artificial Sequence
  Synthetic
ccgttttttttttttaaccgatt

SEQ ID NO: 12222 - DNA, 23 bp, Artificial Sequence
  Synthetic
ccgttttttttttttacactgat

SEQ ID NO: 12223 - DNA, 23 bp, Artificial Sequence
  Synthetic
ccgttttttttttttctatgaca

SEQ ID NO: 12224 - DNA, 23 bp, Artificial Sequence
  Synthetic
ccgttttttttttttagctgagt

SEQ ID NO: 12225 - DNA, 23 bp, Artificial Sequence
  Synthetic
ccgttttttttttttccgagagt

SEQ ID NO: 12226 - DNA, 23 bp, Artificial Sequence
  Synthetic
ccgttttttttttttcttccagt

SEQ ID NO: 12227 - DNA, 23 bp, Artificial Sequence
  Synthetic
ccgttttttttttttcaacaaaa

SEQ ID NO: 12228 - DNA, 23 bp, Artificial Sequence
  Synthetic
ccgttttttttttttataaggat

SEQ ID NO: 12229 - DNA, 23 bp, Artificial Sequence
  Synthetic
ccgttttttttttttaacgcgag

SEQ ID NO: 12230 - DNA, 23 bp, Artificial Sequence
  Synthetic
ccgttttttttttttacggcatt

SEQ ID NO: 12231 - DNA, 23 bp, Artificial Sequence
  Synthetic
ccgttttttttttttcgatgtag

SEQ ID NO: 12232 - DNA, 23 bp, Artificial Sequence
  Synthetic
ccgttttttttttttgcagaacc

SEQ ID NO: 12233 - DNA, 23 bp, Artificial Sequence
  Synthetic
ccgttttttttttttcatccaca

SEQ ID NO: 12234 - DNA, 23 bp, Artificial Sequence
  Synthetic
ccgttttttttttttgcagccgt

SEQ ID NO: 12235 - DNA, 23 bp, Artificial Sequence
  Synthetic
ccgttttttttttttacaacaaa

SEQ ID NO: 12236 - DNA, 23 bp, Artificial Sequence
  Synthetic
ccgttttttttttttcatacagc

SEQ ID NO: 12237 - DNA, 23 bp, Artificial Sequence
  Synthetic
ccgttttttttttttacaggccg

SEQ ID NO: 12238 - DNA, 23 bp, Artificial Sequence
  Synthetic
ccgttttttttttttagcaaaaa

SEQ ID NO: 12239 - DNA, 23 bp, Artificial Sequence
  Synthetic
ccgttttttttttttacagctgg

SEQ ID NO: 12240 - DNA, 23 bp, Artificial Sequence
  Synthetic
ccgttttttttttttctaactgc

SEQ ID NO: 12241 - DNA, 23 bp, Artificial Sequence
  Synthetic
ccgttttttttttttcagttttg

SEQ ID NO: 12242 - DNA, 23 bp, Artificial Sequence
  Synthetic
ccgttttttttttttctacctgc

SEQ ID NO: 12243 - DNA, 23 bp, Artificial Sequence
  Synthetic
ccgttttttttttttcgcccaaa

SEQ ID NO: 12244 - DNA, 23 bp, Artificial Sequence
  Synthetic
ccgttttttttttttcaaccgaa

SEQ ID NO: 12245 - DNA, 23 bp, Artificial Sequence
  Synthetic
ccgttttttttttttcggcatta

SEQ ID NO: 12246 - DNA, 23 bp, Artificial Sequence
  Synthetic
ccgttttttttttttaactatac

SEQ ID NO: 12247 - DNA, 23 bp, Artificial Sequence
  Synthetic
ccgttttttttttttaactacac

SEQ ID NO: 12248 - DNA, 23 bp, Artificial Sequence
  Synthetic
ccgttttttttttttaaccatac

SEQ ID NO: 12249 - DNA, 23 bp, Artificial Sequence
  Synthetic
ccgttttttttttttaactaaac

SEQ ID NO: 12250 - DNA, 23 bp, Artificial Sequence
  Synthetic
ccgttttttttttttactataca

SEQ ID NO: 12251 - DNA, 23 bp, Artificial Sequence
  Synthetic
ccgttttttttttttactgtaca

SEQ ID NO: 12252 - DNA, 23 bp, Artificial Sequence
  Synthetic
ccgttttttttttttacagcaca

SEQ ID NO: 12253 - DNA, 23 bp, Artificial Sequence
  Synthetic
ccgttttttttttttcacaagtt

SEQ ID NO: 12254 - DNA, 23 bp, Artificial Sequence
  Synthetic
ccgttttttttttttcttcagtt

SEQ ID NO: 12255 - DNA, 23 bp, Artificial Sequence
  Synthetic
ccgttttttttttttcatagccc

SEQ ID NO: 12256 - DNA, 23 bp, Artificial Sequence
  Synthetic
ccgttttttttttttctacctgc

SEQ ID NO: 12257 - DNA, 23 bp, Artificial Sequence
  Synthetic
ccgttttttttttttgatagccc

SEQ ID NO: 12258 - DNA, 23 bp, Artificial Sequence
  Synthetic
ccgttttttttttttcacaaatt

SEQ ID NO: 12259 - DNA, 23 bp, Artificial Sequence
  Synthetic
ccgttttttttttttacaaattc

SEQ ID NO: 12260 - DNA, 23 bp, Artificial Sequence
  Synthetic
ccgttttttttttttacaaattc

SEQ ID NO: 12261 - DNA, 23 bp, Artificial Sequence
  Synthetic
ccgttttttttttttacaaacac

SEQ ID NO: 12262 - DNA, 23 bp, Artificial Sequence
  Synthetic
ccgttttttttttttggcattca

SEQ ID NO: 12263 - DNA, 23 bp, Artificial Sequence
  Synthetic
ccgttttttttttttcacaggtt

SEQ ID NO: 12264 - DNA, 23 bp, Artificial Sequence
  Synthetic
ccgttttttttttttcacaagtt

SEQ ID NO: 12265 - DNA, 23 bp, Artificial Sequence
  Synthetic
ccgttttttttttttgcattatt

SEQ ID NO: 12266 - DNA, 23 bp, Artificial Sequence
  Synthetic
ccgttttttttttttcgcgtacc

SEQ ID NO: 12267 - DNA, 23 bp, Artificial Sequence
  Synthetic
ccgttttttttttttaaaagaga

SEQ ID NO: 12268 - DNA, 23 bp, Artificial Sequence
  Synthetic
ccgttttttttttttgcaagccc

SEQ ID NO: 12269 - DNA, 23 bp, Artificial Sequence
  Synthetic
ccgttttttttttttatgccctt

SEQ ID NO: 12270 - DNA, 23 bp, Artificial Sequence
  Synthetic
ccgttttttttttttatgccctt

SEQ ID NO: 12271 - DNA, 23 bp, Artificial Sequence
  Synthetic
ccgttttttttttttatgccctt

SEQ ID NO: 12272 - DNA, 23 bp, Artificial Sequence
  Synthetic
ccgttttttttttttcgaccatg

SEQ ID NO: 12273 - DNA, 23 bp, Artificial Sequence
  Synthetic
ccgttttttttttttacagctgg

SEQ ID NO: 12274 - DNA, 23 bp, Artificial Sequence
  Synthetic
ccgttttttttttttagctggtt

SEQ ID NO: 12275 - DNA, 23 bp, Artificial Sequence
  Synthetic
ccgttttttttttttgcagctgg

SEQ ID NO: 12276 - DNA, 23 bp, Artificial Sequence
  Synthetic
ccgttttttttttttgcggctgg

SEQ ID NO: 12277 - DNA, 23 bp, Artificial Sequence
  Synthetic
ccgttttttttttttcacatagg

SEQ ID NO: 12278 - DNA, 23 bp, Artificial Sequence
  Synthetic
ccgttttttttttttctacgcgt

SEQ ID NO: 12279 - DNA, 23 bp, Artificial Sequence
  Synthetic
ccgttttttttttttgattcaca

SEQ ID NO: 12280 - DNA, 23 bp, Artificial Sequence
  Synthetic
ccgttttttttttttagacacat

SEQ ID NO: 12281 - DNA, 23 bp, Artificial Sequence
  Synthetic
ccgttttttttttttctaccata

SEQ ID NO: 12282 - DNA, 23 bp, Artificial Sequence
  Synthetic
ccgttttttttttttccataaag

SEQ ID NO: 12283 - DNA, 23 bp, Artificial Sequence
  Synthetic
ccgttttttttttttgtagtgct

SEQ ID NO: 12284 - DNA, 23 bp, Artificial Sequence
  Synthetic
ccgttttttttttttcgagctac

SEQ ID NO: 12285 - DNA, 23 bp, Artificial Sequence
  Synthetic
ccgttttttttttttagtacatc

SEQ ID NO: 12286 - DNA, 23 bp, Artificial Sequence
  Synthetic
ccgttttttttttttaagggatt

SEQ ID NO: 12287 - DNA, 23 bp, Artificial Sequence
  Synthetic
ccgttttttttttttaacctatg

SEQ ID NO: 12288 - DNA, 23 bp, Artificial Sequence
  Synthetic
ccgttttttttttttacaaagtt

SEQ ID NO: 12289 - DNA, 23 bp, Artificial Sequence
  Synthetic
ccgttttttttttttacaaagtt

SEQ ID NO: 12290 - DNA, 23 bp, Artificial Sequence
  Synthetic
ccgttttttttttttctctggta

SEQ ID NO: 12291 - DNA, 23 bp, Artificial Sequence
  Synthetic
ccgttttttttttttcacttttg

SEQ ID NO: 12292 - DNA, 23 bp, Artificial Sequence
  Synthetic
ccgttttttttttttcccctatc

SEQ ID NO: 12293 - DNA, 23 bp, Artificial Sequence
  Synthetic
ccgttttttttttttcacaaacc

SEQ ID NO: 12294 - DNA, 23 bp, Artificial Sequence
  Synthetic
ccgttttttttttttgcaaatca

SEQ ID NO: 12295 - DNA, 23 bp, Artificial Sequence
  Synthetic
ccgttttttttttttacaaacca

SEQ ID NO: 12296 - DNA, 23 bp, Artificial Sequence
  Synthetic
ccgttttttttttttcaccaata

SEQ ID NO: 12297 - DNA, 23 bp, Artificial Sequence
  Synthetic
ccgttttttttttttacccaata

SEQ ID NO: 12298 - DNA, 23 bp, Artificial Sequence
  Synthetic
ccgttttttttttttctccagta

SEQ ID NO: 12299 - DNA, 23 bp, Artificial Sequence
  Synthetic
ccgttttttttttttacaagtgc

SEQ ID NO: 12300 - DNA, 23 bp, Artificial Sequence
  Synthetic
ccgttttttttttttactacctg

SEQ ID NO: 12301 - DNA, 23 bp, Artificial Sequence
  Synthetic
ccgttttttttttttactcaccg

SEQ ID NO: 12302 - DNA, 23 bp, Artificial Sequence
  Synthetic
ccgttttttttttttgtacagtc

SEQ ID NO: 12303 - DNA, 23 bp, Artificial Sequence
  Synthetic
ccgttttttttttttcccaccga

SEQ ID NO: 12304 - DNA, 23 bp, Artificial Sequence
  Synthetic
ccgttttttttttttgtgagttc

SEQ ID NO: 12305 - DNA, 23 bp, Artificial Sequence
  Synthetic
ccgttttttttttttagttggca

SEQ ID NO: 12306 - DNA, 23 bp, Artificial Sequence
  Synthetic
ccgttttttttttttcagtgaat

SEQ ID NO: 12307 - DNA, 23 bp, Artificial Sequence
  Synthetic
ccgttttttttttttagccttat

SEQ ID NO: 12308 - DNA, 23 bp, Artificial Sequence
  Synthetic
ccgttttttttttttggctgcaa

SEQ ID NO: 12309 - DNA, 23 bp, Artificial Sequence
  Synthetic
ccgttttttttttttactgatat

SEQ ID NO: 12310 - DNA, 23 bp, Artificial Sequence
  Synthetic
ccgttttttttttttatctgcac

SEQ ID NO: 12311 - DNA, 23 bp, Artificial Sequence
  Synthetic
ccgttttttttttttctaactgc

SEQ ID NO: 12312 - DNA, 23 bp, Artificial Sequence
  Synthetic
ccgttttttttttttagctgctt

SEQ ID NO: 12313 - DNA, 23 bp, Artificial Sequence
  Synthetic
ccgttttttttttttggctgtca

SEQ ID NO: 12314 - DNA, 23 bp, Artificial Sequence
  Synthetic
ccgttttttttttttgaagcggg

SEQ ID NO: 12315 - DNA, 23 bp, Artificial Sequence
  Synthetic
ccgttttttttttttccacatgg

SEQ ID NO: 12316 - DNA, 23 bp, Artificial Sequence
  Synthetic
ccgttttttttttttccaacaac

SEQ ID NO: 12317 - DNA, 23 bp, Artificial Sequence
  Synthetic
ccgttttttttttttccaacaac

SEQ ID NO: 12318 - DNA, 23 bp, Artificial Sequence
  Synthetic
ccgttttttttttttgaacaggt

SEQ ID NO: 12319 - DNA, 23 bp, Artificial Sequence
  Synthetic
ccgttttttttttttaaccaatg

SEQ ID NO: 12320 - DNA, 23 bp, Artificial Sequence
  Synthetic
ccgttttttttttttgaacacgt

SEQ ID NO: 12321 - DNA, 23 bp, Artificial Sequence
  Synthetic
ccgttttttttttttcagttttg

SEQ ID NO: 12322 - DNA, 23 bp, Artificial Sequence
  Synthetic
ccgttttttttttttcagttttg

SEQ ID NO: 12323 - DNA, 23 bp, Artificial Sequence
  Synthetic
ccgttttttttttttacatactt

SEQ ID NO: 12324 - DNA, 23 bp, Artificial Sequence
  Synthetic
ccgttttttttttttacatactt

SEQ ID NO: 12325 - DNA, 23 bp, Artificial Sequence
  Synthetic
ccgttttttttttttacatcgtt

SEQ ID NO: 12326 - DNA, 23 bp, Artificial Sequence
  Synthetic
ccgttttttttttttatcatcat

SEQ ID NO: 12327 - DNA, 23 bp, Artificial Sequence
  Synthetic
ccgttttttttttttcccatgcc

SEQ ID NO: 12328 - DNA, 23 bp, Artificial Sequence
  Synthetic
ccgttttttttttttaaagaggt

SEQ ID NO: 12329 - DNA, 23 bp, Artificial Sequence
  Synthetic
ccgttttttttttttcaagtggt

SEQ ID NO: 12330 - DNA, 23 bp, Artificial Sequence
  Synthetic
ccgttttttttttttaggcatag

SEQ ID NO: 12331 - DNA, 23 bp, Artificial Sequence
  Synthetic
ccgttttttttttttcagactcc

SEQ ID NO: 12332 - DNA, 23 bp, Artificial Sequence
  Synthetic
ccgttttttttttttcaggatcc

SEQ ID NO: 12333 - DNA, 23 bp, Artificial Sequence
  Synthetic
ccgttttttttttttccacacac

SEQ ID NO: 12334 - DNA, 23 bp, Artificial Sequence
  Synthetic
ccgttttttttttttacaagctt

SEQ ID NO: 12335 - DNA, 23 bp, Artificial Sequence
  Synthetic
ccgttttttttttttctacctgc

SEQ ID NO: 12336 - DNA, 23 bp, Artificial Sequence
  Synthetic
ccgttttttttttttaagtgctc

SEQ ID NO: 12337 - DNA, 23 bp, Artificial Sequence
  Synthetic
ccgttttttttttttctacctgc

SEQ ID NO: 12338 - DNA, 23 bp, Artificial Sequence
  Synthetic
ccgttttttttttttagccgctg

SEQ ID NO: 12339 - DNA, 23 bp, Artificial Sequence
  Synthetic
ccgttttttttttttagccatga

SEQ ID NO: 12340 - DNA, 23 bp, Artificial Sequence
  Synthetic
ccgttttttttttttctgcctgt

SEQ ID NO: 12341 - DNA, 23 bp, Artificial Sequence
  Synthetic
ccgttttttttttttggctgtca

SEQ ID NO: 12342 - DNA, 23 bp, Artificial Sequence
  Synthetic
ccgttttttttttttcacagttg

SEQ ID NO: 12343 - DNA, 23 bp, Artificial Sequence
  Synthetic
ccgttttttttttttatccaatc

SEQ ID NO: 12344 - DNA, 23 bp, Artificial Sequence
  Synthetic
ccgttttttttttttacatggtt

SEQ ID NO: 12345 - DNA, 23 bp, Artificial Sequence
  Synthetic
ccgttttttttttttagaattgc

SEQ ID NO: 12346 - DNA, 23 bp, Artificial Sequence
  Synthetic
ccgttttttttttttacagttct

SEQ ID NO: 12347 - DNA, 23 bp, Artificial Sequence
  Synthetic
ccgttttttttttttaaagcttg

SEQ ID NO: 12348 - DNA, 23 bp, Artificial Sequence
  Synthetic
ccgttttttttttttgaaaccca

SEQ ID NO: 12349 - DNA, 23 bp, Artificial Sequence
  Synthetic
ccgttttttttttttgagaccca

SEQ ID NO: 12350 - DNA, 23 bp, Artificial Sequence
  Synthetic
ccgttttttttttttggggtatt

SEQ ID NO: 12351 - DNA, 23 bp, Artificial Sequence
  Synthetic
ccgttttttttttttggaaatcc

SEQ ID NO: 12352 - DNA, 23 bp, Artificial Sequence
  Synthetic
ccgttttttttttttggtaatcc

SEQ ID NO: 12353 - DNA, 23 bp, Artificial Sequence
  Synthetic
ccgttttttttttttctgttcct

SEQ ID NO: 12354 - DNA, 23 bp, Artificial Sequence
  Synthetic
ccgttttttttttttctgtcctg

SEQ ID NO: 12355 - DNA, 23 bp, Artificial Sequence
  Synthetic
ccgttttttttttttcagaccga

SEQ ID NO: 12356 - DNA, 23 bp, Artificial Sequence
  Synthetic
ccgttttttttttttgcctatcc

SEQ ID NO: 12357 - DNA, 23 bp, Artificial Sequence
  Synthetic
ccgttttttttttttgcggaact

SEQ ID NO: 12358 - DNA, 23 bp, Artificial Sequence
  Synthetic
ccgttttttttttttgcagaact

SEQ ID NO: 12359 - DNA, 23 bp, Artificial Sequence
  Synthetic
ccgttttttttttttgtggaact

SEQ ID NO: 12360 - DNA, 23 bp, Artificial Sequence
  Synthetic
ccgttttttttttttaaccgatt

SEQ ID NO: 12361 - DNA, 23 bp, Artificial Sequence
  Synthetic
ccgttttttttttttaacactga

SEQ ID NO: 12362 - DNA, 23 bp, Artificial Sequence
  Synthetic
ccgttttttttttttaccgattt

SEQ ID NO: 12363 - DNA, 23 bp, Artificial Sequence
  Synthetic
ccgttttttttttttgaacacca

SEQ ID NO: 12364 - DNA, 23 bp, Artificial Sequence
  Synthetic
ccgttttttttttttgacactga

SEQ ID NO: 12365 - DNA, 23 bp, Artificial Sequence
  Synthetic
ccgttttttttttttgctttgac

SEQ ID NO: 12366 - DNA, 23 bp, Artificial Sequence
  Synthetic
ccgttttttttttttccactaaa

SEQ ID NO: 12367 - DNA, 23 bp, Artificial Sequence
  Synthetic
ccgttttttttttttgctgcaaa

SEQ ID NO: 12368 - DNA, 23 bp, Artificial Sequence
  Synthetic
ccgttttttttttttcttccagt

SEQ ID NO: 12369 - DNA, 23 bp, Artificial Sequence
  Synthetic
ccgttttttttttttagctgagt

SEQ ID NO: 12370 - DNA, 23 bp, Artificial Sequence
  Synthetic
ccgttttttttttttgctgagag

SEQ ID NO: 12371 - DNA, 23 bp, Artificial Sequence
  Synthetic
ccgttttttttttttcttccagt

SEQ ID NO: 12372 - DNA, 23 bp, Artificial Sequence
  Synthetic
ccgttttttttttttccagtcaa

SEQ ID NO: 12373 - DNA, 23 bp, Artificial Sequence
  Synthetic
ccgttttttttttttcagctatg

SEQ ID NO: 12374 - DNA, 23 bp, Artificial Sequence
  Synthetic
ccgttttttttttttcaacaaaa

SEQ ID NO: 12375 - DNA, 23 bp, Artificial Sequence
  Synthetic
ccgttttttttttttcaatgcaa

SEQ ID NO: 12376 - DNA, 23 bp, Artificial Sequence
  Synthetic
ccgttttttttttttcaatgcaa

SEQ ID NO: 12377 - DNA, 23 bp, Artificial Sequence
  Synthetic
ccgttttttttttttaacaacca

SEQ ID NO: 12378 - DNA, 23 bp, Artificial Sequence
  Synthetic
ccgttttttttttttcaatcagc

SEQ ID NO: 12379 - DNA, 23 bp, Artificial Sequence
  Synthetic
ccgttttttttttttacagatgg

SEQ ID NO: 12380 - DNA, 23 bp, Artificial Sequence
  Synthetic
ccgttttttttttttaaattgca

SEQ ID NO: 12381 - DNA, 23 bp, Artificial Sequence
  Synthetic
ccgttttttttttttataaggat

SEQ ID NO: 12382 - DNA, 23 bp, Artificial Sequence
  Synthetic
ccgttttttttttttcaccattg

SEQ ID NO: 12383 - DNA, 23 bp, Artificial Sequence
  Synthetic
ccgttttttttttttagccacaa

SEQ ID NO: 12384 - DNA, 23 bp, Artificial Sequence
  Synthetic
ccgttttttttttttcaacggga

SEQ ID NO: 12385 - DNA, 23 bp, Artificial Sequence
  Synthetic
ccgttttttttttttcaaccgaa

SEQ ID NO: 12386 - DNA, 23 bp, Artificial Sequence
  Synthetic
ccgttttttttttttacggcatt

SEQ ID NO: 12387 - DNA, 23 bp, Artificial Sequence
  Synthetic
ccgttttttttttttaccagcta

SEQ ID NO: 12388 - DNA, 23 bp, Artificial Sequence
  Synthetic
ccgttttttttttttaactcagt

SEQ ID NO: 12389 - DNA, 23 bp, Artificial Sequence
  Synthetic
ccgttttttttttttcgatgtag

SEQ ID NO: 12390 - DNA, 23 bp, Artificial Sequence
  Synthetic
ccgttttttttttttgcagccgt

SEQ ID NO: 12391 - DNA, 23 bp, Artificial Sequence
  Synthetic
ccgttttttttttttctaaacat

SEQ ID NO: 12392 - DNA, 23 bp, Artificial Sequence
  Synthetic
ccgttttttttttttcaacaaaa

SEQ ID NO: 12393 - DNA, 23 bp, Artificial Sequence
  Synthetic
ccgttttttttttttcatacagc

SEQ ID NO: 12394 - DNA, 23 bp, Artificial Sequence
  Synthetic
ccgttttttttttttactttcgg

SEQ ID NO: 12395 - DNA, 23 bp, Artificial Sequence
  Synthetic
ccgttttttttttttcaggccgg

SEQ ID NO: 12396 - DNA, 23 bp, Artificial Sequence
  Synthetic
ccgttttttttttttgaggccgg

SEQ ID NO: 12397 - DNA, 23 bp, Artificial Sequence
  Synthetic
ccgttttttttttttctacctgc

SEQ ID NO: 12398 - DNA, 23 bp, Artificial Sequence
  Synthetic
ccgttttttttttttctacctgc

SEQ ID NO: 12399 - DNA, 23 bp, Artificial Sequence
  Synthetic
ccgttttttttttttagcaaaaa

SEQ ID NO: 12400 - DNA, 23 bp, Artificial Sequence
  Synthetic
ccgttttttttttttaacaatac

SEQ ID NO: 12401 - DNA, 23 bp, Artificial Sequence
  Synthetic
ccgttttttttttttcacaagat

SEQ ID NO: 12402 - DNA, 23 bp, Artificial Sequence
  Synthetic
ccgttttttttttttcatacagc

SEQ ID NO: 12403 - DNA, 23 bp, Artificial Sequence
  Synthetic
ccgttttttttttttactttcgg

SEQ ID NO: 12404 - DNA, 23 bp, Artificial Sequence
  Synthetic
ccgttttttttttttcatacagc

SEQ ID NO: 12405 - DNA, 23 bp, Artificial Sequence
  Synthetic
ccgttttttttttttacgttcgg

SEQ ID NO: 12406 - DNA, 23 bp, Artificial Sequence
  Synthetic
ccgttttttttttttgtgctcac

SEQ ID NO: 12407 - DNA, 23 bp, Artificial Sequence
  Synthetic
ccgttttttttttttgtgctcac

SEQ ID NO: 12408 - DNA, 23 bp, Artificial Sequence
  Synthetic
ccgttttttttttttgtgctcac

SEQ ID NO: 12409 - DNA, 23 bp, Artificial Sequence
  Synthetic
ccgttttttttttttgtgctcac

SEQ ID NO: 12410 - DNA, 23 bp, Artificial Sequence
  Synthetic
ccgttttttttttttgtgctcac

SEQ ID NO: 12411 - DNA, 23 bp, Artificial Sequence
  Synthetic
ccgttttttttttttgtgctcac

SEQ ID NO: 12412 - DNA, 23 bp, Artificial Sequence
  Synthetic
ccgttttttttttttgtgctcac

SEQ ID NO: 12413 - DNA, 23 bp, Artificial Sequence
  Synthetic
ccgttttttttttttgtgctcac

SEQ ID NO: 12414 - DNA, 23 bp, Artificial Sequence
  Synthetic
ccgttttttttttttgtgctcac

SEQ ID NO: 12415 - DNA, 23 bp, Artificial Sequence
  Synthetic
ccgttttttttttttgtgctctc

SEQ ID NO: 12416 - DNA, 23 bp, Artificial Sequence
  Synthetic
ccgttttttttttttgtgctcgc

SEQ ID NO: 12417 - DNA, 23 bp, Artificial Sequence
  Synthetic
ccgttttttttttttcagagctc

SEQ ID NO: 12418 - DNA, 23 bp, Artificial Sequence
  Synthetic
ccgttttttttttttcagagctc

SEQ ID NO: 12419 - DNA, 23 bp, Artificial Sequence
  Synthetic
ccgttttttttttttaggagctc

SEQ ID NO: 12420 - DNA, 23 bp, Artificial Sequence
  Synthetic
ccgttttttttttttaggagctc

SEQ ID NO: 12421 - DNA, 23 bp, Artificial Sequence
  Synthetic
ccgttttttttttttggcataca

SEQ ID NO: 12422 - DNA, 23 bp, Artificial Sequence
  Synthetic
ccgttttttttttttggcataca

SEQ ID NO: 12423 - DNA, 23 bp, Artificial Sequence
  Synthetic
ccgttttttttttttggcataca

SEQ ID NO: 12424 - DNA, 23 bp, Artificial Sequence
  Synthetic
ccgttttttttttttggcataca

SEQ ID NO: 12425 - DNA, 23 bp, Artificial Sequence
  Synthetic
ccgttttttttttttggcataca

SEQ ID NO: 12426 - DNA, 23 bp, Artificial Sequence
  Synthetic
ccgttttttttttttcggcatac

SEQ ID NO: 12427 - DNA, 23 bp, Artificial Sequence
  Synthetic
ccgttttttttttttggatgcag

SEQ ID NO: 12428 - DNA, 23 bp, Artificial Sequence
  Synthetic
ccgttttttttttttgcacgtgc

SEQ ID NO: 12429 - DNA, 23 bp, Artificial Sequence
  Synthetic
ccgttttttttttttgcacgtgc

SEQ ID NO: 12430 - DNA, 23 bp, Artificial Sequence
  Synthetic
ccgttttttttttttgcacgtgc

SEQ ID NO: 12431 - DNA, 23 bp, Artificial Sequence
  Synthetic
ccgttttttttttttgcacgtgc

SEQ ID NO: 12432 - DNA, 23 bp, Artificial Sequence
  Synthetic
ccgttttttttttttggggaatg

SEQ ID NO: 12433 - DNA, 23 bp, Artificial Sequence
  Synthetic
ccgttttttttttttgggaatga

SEQ ID NO: 12434 - DNA, 23 bp, Artificial Sequence
  Synthetic
ccgttttttttttttgggaatga

SEQ ID NO: 12435 - DNA, 23 bp, Artificial Sequence
  Synthetic
ccgttttttttttttgggaatga

SEQ ID NO: 12436 - DNA, 23 bp, Artificial Sequence
  Synthetic
ccgttttttttttttgggaatga

SEQ ID NO: 12437 - DNA, 23 bp, Artificial Sequence
  Synthetic
ccgttttttttttttgggaatga

SEQ ID NO: 12438 - DNA, 23 bp, Artificial Sequence
  Synthetic
ccgttttttttttttgggaatga

SEQ ID NO: 12439 - DNA, 23 bp, Artificial Sequence
  Synthetic
ccgttttttttttttgggaatga

SEQ ID NO: 12440 - DNA, 23 bp, Artificial Sequence
  Synthetic
ccgttttttttttttgggaatga

SEQ ID NO: 12441 - DNA, 23 bp, Artificial Sequence
  Synthetic
ccgttttttttttttagggattg

SEQ ID NO: 12442 - DNA, 23 bp, Artificial Sequence
  Synthetic
ccgttttttttttttagggattg

SEQ ID NO: 12443 - DNA, 23 bp, Artificial Sequence
  Synthetic
ccgttttttttttttgaggaatg

SEQ ID NO: 12444 - DNA, 23 bp, Artificial Sequence
  Synthetic
ccgttttttttttttgaggaatg

SEQ ID NO: 12445 - DNA, 23 bp, Artificial Sequence
  Synthetic
ccgttttttttttttagatcatg

SEQ ID NO: 12446 - DNA, 23 bp, Artificial Sequence
  Synthetic
ccgttttttttttttagatcatg

SEQ ID NO: 12447 - DNA, 23 bp, Artificial Sequence
  Synthetic
ccgttttttttttttagatcatg

SEQ ID NO: 12448 - DNA, 23 bp, Artificial Sequence
  Synthetic
ccgttttttttttttagatcatg

SEQ ID NO: 12449 - DNA, 23 bp, Artificial Sequence
  Synthetic
ccgttttttttttttcagatcat

SEQ ID NO: 12450 - DNA, 23 bp, Artificial Sequence
  Synthetic
ccgttttttttttttcagatcat

SEQ ID NO: 12451 - DNA, 23 bp, Artificial Sequence
  Synthetic
ccgttttttttttttcagatcat

SEQ ID NO: 12452 - DNA, 23 bp, Artificial Sequence
  Synthetic
ccgttttttttttttcagatcat

SEQ ID NO: 12453 - DNA, 23 bp, Artificial Sequence
  Synthetic
ccgttttttttttttcagatcat

SEQ ID NO: 12454 - DNA, 23 bp, Artificial Sequence
  Synthetic
ccgttttttttttttgtcccgat

SEQ ID NO: 12455 - DNA, 23 bp, Artificial Sequence
  Synthetic
ccgttttttttttttgtcccgat

SEQ ID NO: 12456 - DNA, 23 bp, Artificial Sequence
  Synthetic
ccgttttttttttttcggcaagt

SEQ ID NO: 12457 - DNA, 23 bp, Artificial Sequence
  Synthetic
ccgttttttttttttcggcaagt

SEQ ID NO: 12458 - DNA, 23 bp, Artificial Sequence
  Synthetic
ccgttttttttttttccggcaag

SEQ ID NO: 12459 - DNA, 23 bp, Artificial Sequence
  Synthetic
ccgttttttttttttcataggca

SEQ ID NO: 12460 - DNA, 23 bp, Artificial Sequence
  Synthetic
ccgttttttttttttcgtaggca

SEQ ID NO: 12461 - DNA, 23 bp, Artificial Sequence
  Synthetic
ccgttttttttttttaggcaagt

SEQ ID NO: 12462 - DNA, 23 bp, Artificial Sequence
  Synthetic
ccgttttttttttttaggcaagt

SEQ ID NO: 12463 - DNA, 23 bp, Artificial Sequence
  Synthetic
ccgttttttttttttaggcaagt

SEQ ID NO: 12464 - DNA, 23 bp, Artificial Sequence
  Synthetic
ccgttttttttttttcaggcaag

SEQ ID NO: 12465 - DNA, 23 bp, Artificial Sequence
  Synthetic
ccgttttttttttttcaggcaag

SEQ ID NO: 12466 - DNA, 23 bp, Artificial Sequence
  Synthetic
ccgttttttttttttcaggcaag

SEQ ID NO: 12467 - DNA, 23 bp, Artificial Sequence
  Synthetic
ccgttttttttttttatattggc

SEQ ID NO: 12468 - DNA, 23 bp, Artificial Sequence
  Synthetic
ccgttttttttttttgtgatatt

SEQ ID NO: 12469 - DNA, 23 bp, Artificial Sequence
  Synthetic
ccgttttttttttttgatattgg

SEQ ID NO: 12470 - DNA, 23 bp, Artificial Sequence
  Synthetic
ccgttttttttttttgatattgg

SEQ ID NO: 12471 - DNA, 23 bp, Artificial Sequence
  Synthetic
ccgttttttttttttgatattgg

SEQ ID NO: 12472 - DNA, 23 bp, Artificial Sequence
  Synthetic
ccgttttttttttttgtgatatt

SEQ ID NO: 12473 - DNA, 23 bp, Artificial Sequence
  Synthetic
ccgttttttttttttgatattgg

SEQ ID NO: 12474 - DNA, 23 bp, Artificial Sequence
  Synthetic
ccgttttttttttttagtgatat

SEQ ID NO: 12475 - DNA, 23 bp, Artificial Sequence
  Synthetic
ccgttttttttttttgatattgg

SEQ ID NO: 12476 - DNA, 23 bp, Artificial Sequence
  Synthetic
ccgttttttttttttgatattgg

SEQ ID NO: 12477 - DNA, 23 bp, Artificial Sequence
  Synthetic
ccgttttttttttttagtgatat

SEQ ID NO: 12478 - DNA, 23 bp, Artificial Sequence
  Synthetic
ccgttttttttttttgcagcatc

SEQ ID NO: 12479 - DNA, 23 bp, Artificial Sequence
  Synthetic
ccgttttttttttttgcagcatc

SEQ ID NO: 12480 - DNA, 23 bp, Artificial Sequence
  Synthetic
ccgttttttttttttgcagcatc

SEQ ID NO: 12481 - DNA, 23 bp, Artificial Sequence
  Synthetic
ccgttttttttttttgcagcatc

SEQ ID NO: 12482 - DNA, 23 bp, Artificial Sequence
  Synthetic
ccgttttttttttttatgcagca

SEQ ID NO: 12483 - DNA, 23 bp, Artificial Sequence
  Synthetic
ccgttttttttttttgggagcac

SEQ ID NO: 12484 - DNA, 23 bp, Artificial Sequence
  Synthetic
ccgttttttttttttgggagcac

SEQ ID NO: 12485 - DNA, 23 bp, Artificial Sequence
  Synthetic
ccgttttttttttttgggagcac

SEQ ID NO: 12486 - DNA, 23 bp, Artificial Sequence
  Synthetic
ccgttttttttttttgggagcac

SEQ ID NO: 12487 - DNA, 23 bp, Artificial Sequence
  Synthetic
ccgttttttttttttagatcaat

SEQ ID NO: 12488 - DNA, 23 bp, Artificial Sequence
  Synthetic
ccgttttttttttttggaggtgg

SEQ ID NO: 12489 - DNA, 23 bp, Artificial Sequence
  Synthetic
ccgttttttttttttggaggtgg

SEQ ID NO: 12490 - DNA, 23 bp, Artificial Sequence
  Synthetic
ccgttttttttttttgagttccc

SEQ ID NO: 12491 - DNA, 23 bp, Artificial Sequence
  Synthetic
ccgttttttttttttgagttccc

SEQ ID NO: 12492 - DNA, 23 bp, Artificial Sequence
  Synthetic
ccgttttttttttttgagttcct

SEQ ID NO: 12493 - DNA, 23 bp, Artificial Sequence
  Synthetic
ccgttttttttttttcagttcaa

SEQ ID NO: 12494 - DNA, 23 bp, Artificial Sequence
  Synthetic
ccgttttttttttttcagttcaa

SEQ ID NO: 12495 - DNA, 23 bp, Artificial Sequence
  Synthetic
ccgttttttttttttcagggcaa

SEQ ID NO: 12496 - DNA, 23 bp, Artificial Sequence
  Synthetic
ccgttttttttttttcaggacag

SEQ ID NO: 12497 - DNA, 23 bp, Artificial Sequence
  Synthetic
ccgttttttttttttcagggcaa

SEQ ID NO: 12498 - DNA, 23 bp, Artificial Sequence
  Synthetic
ccgttttttttttttcagggcag

SEQ ID NO: 12499 - DNA, 23 bp, Artificial Sequence
  Synthetic
ccgttttttttttttcagggcaa

SEQ ID NO: 12500 - DNA, 23 bp, Artificial Sequence
  Synthetic
ccgttttttttttttcggggcaa

SEQ ID NO: 12501 - DNA, 23 bp, Artificial Sequence
  Synthetic
ccgttttttttttttgccaggga

SEQ ID NO: 12502 - DNA, 23 bp, Artificial Sequence
  Synthetic
ccgttttttttttttatcagctt

SEQ ID NO: 12503 - DNA, 23 bp, Artificial Sequence
  Synthetic
ccgttttttttttttctatacaa

SEQ ID NO: 12504 - DNA, 23 bp, Artificial Sequence
  Synthetic
ccgttttttttttttccatactt

SEQ ID NO: 12505 - DNA, 23 bp, Artificial Sequence
  Synthetic
ccgttttttttttttcaaattcg

SEQ ID NO: 12506 - DNA, 23 bp, Artificial Sequence
  Synthetic
ccgttttttttttttacaagttc

SEQ ID NO: 12507 - DNA, 23 bp, Artificial Sequence
  Synthetic
ccgttttttttttttggcattca

SEQ ID NO: 12508 - DNA, 23 bp, Artificial Sequence
  Synthetic
ccgttttttttttttacaagtta

SEQ ID NO: 12509 - DNA, 23 bp, Artificial Sequence
  Synthetic
ccgttttttttttttcagctggt

SEQ ID NO: 12510 - DNA, 23 bp, Artificial Sequence
  Synthetic
ccgttttttttttttctcgtcaa

SEQ ID NO: 12511 - DNA, 23 bp, Artificial Sequence
  Synthetic
ccgttttttttttttggagagag

SEQ ID NO: 12512 - DNA, 23 bp, Artificial Sequence
  Synthetic
ccgttttttttttttccttatca

SEQ ID NO: 12513 - DNA, 23 bp, Artificial Sequence
  Synthetic
ccgttttttttttttcacagcca

SEQ ID NO: 12514 - DNA, 23 bp, Artificial Sequence
  Synthetic
ccgttttttttttttgccgttgt

SEQ ID NO: 12515 - DNA, 23 bp, Artificial Sequence
  Synthetic
ccgttttttttttttaagaattg

SEQ ID NO: 12516 - DNA, 23 bp, Artificial Sequence
  Synthetic
ccgttttttttttttgaattctt

SEQ ID NO: 12517 - DNA, 23 bp, Artificial Sequence
  Synthetic
ccgttttttttttttgcgcgcta

SEQ ID NO: 12518 - DNA, 23 bp, Artificial Sequence
  Synthetic
ccgttttttttttttgtaggaac

SEQ ID NO: 12519 - DNA, 23 bp, Artificial Sequence
  Synthetic
ccgttttttttttttcgtaccag

SEQ ID NO: 12520 - DNA, 23 bp, Artificial Sequence
  Synthetic
ccgttttttttttttaacggacg

SEQ ID NO: 12521 - DNA, 23 bp, Artificial Sequence
  Synthetic
ccgttttttttttttatgagtgt

SEQ ID NO: 12522 - DNA, 23 bp, Artificial Sequence
  Synthetic
ccgttttttttttttaaagagag

SEQ ID NO: 12523 - DNA, 23 bp, Artificial Sequence
  Synthetic
ccgttttttttttttcagacaaa

SEQ ID NO: 12524 - DNA, 23 bp, Artificial Sequence
  Synthetic
ccgttttttttttttgaattacc

SEQ ID NO: 12525 - DNA, 23 bp, Artificial Sequence
  Synthetic
ccgttttttttttttagagcacc

SEQ ID NO: 12526 - DNA, 23 bp, Artificial Sequence
  Synthetic
ccgttttttttttttcactcaag

SEQ ID NO: 12527 - DNA, 23 bp, Artificial Sequence
  Synthetic
ccgttttttttttttcacagtat

SEQ ID NO: 12528 - DNA, 23 bp, Artificial Sequence
  Synthetic
ccgttttttttttttctttctga

SEQ ID NO: 12529 - DNA, 23 bp, Artificial Sequence
  Synthetic
ccgttttttttttttctgagata

SEQ ID NO: 12530 - DNA, 23 bp, Artificial Sequence
  Synthetic
ccgttttttttttttcaacaaaa

SEQ ID NO: 12531 - DNA, 23 bp, Artificial Sequence
  Synthetic
ccgttttttttttttgctttggt

SEQ ID NO: 12532 - DNA, 23 bp, Artificial Sequence
  Synthetic
ccgttttttttttttacatcttt

SEQ ID NO: 12533 - DNA, 23 bp, Artificial Sequence
  Synthetic
ccgttttttttttttaggccggg

SEQ ID NO: 12534 - DNA, 23 bp, Artificial Sequence
  Synthetic
ccgttttttttttttcaggccgg

SEQ ID NO: 12535 - DNA, 23 bp, Artificial Sequence
  Synthetic
ccgttttttttttttatacagct

SEQ ID NO: 12536 - DNA, 23 bp, Artificial Sequence
  Synthetic
ccgttttttttttttatacagct

SEQ ID NO: 12537 - DNA, 23 bp, Artificial Sequence
  Synthetic
ccgttttttttttttacagctag

SEQ ID NO: 12538 - DNA, 23 bp, Artificial Sequence
  Synthetic
ccgttttttttttttaggataca

SEQ ID NO: 12539 - DNA, 23 bp, Artificial Sequence
  Synthetic
ccgttttttttttttacaagttc

SEQ ID NO: 12540 - DNA, 23 bp, Artificial Sequence
  Synthetic
ccgttttttttttttcagttatc

SEQ ID NO: 12541 - DNA, 23 bp, Artificial Sequence
  Synthetic
ccgttttttttttttatagccct

SEQ ID NO: 12542 - DNA, 23 bp, Artificial Sequence
  Synthetic
ccgttttttttttttctacctgc

SEQ ID NO: 12543 - DNA, 23 bp, Artificial Sequence
  Synthetic
ccgttttttttttttctgcactg

SEQ ID NO: 12544 - DNA, 23 bp, Artificial Sequence
  Synthetic
ccgttttttttttttacaaattc

SEQ ID NO: 12545 - DNA, 23 bp, Artificial Sequence
  Synthetic
ccgttttttttttttgcattcac

SEQ ID NO: 12546 - DNA, 23 bp, Artificial Sequence
  Synthetic
ccgttttttttttttacaagtta

SEQ ID NO: 12547 - DNA, 23 bp, Artificial Sequence
  Synthetic
ccgttttttttttttgccaagct

SEQ ID NO: 12548 - DNA, 23 bp, Artificial Sequence
  Synthetic
ccgttttttttttttaaagagac

SEQ ID NO: 12549 - DNA, 23 bp, Artificial Sequence
  Synthetic
ccgttttttttttttcagctggt

SEQ ID NO: 12550 - DNA, 23 bp, Artificial Sequence
  Synthetic
ccgttttttttttttacatagga

SEQ ID NO: 12551 - DNA, 23 bp, Artificial Sequence
  Synthetic
ccgttttttttttttacaaacca

SEQ ID NO: 12552 - DNA, 23 bp, Artificial Sequence
  Synthetic
ccgttttttttttttaaaccatg

SEQ ID NO: 12553 - DNA, 23 bp, Artificial Sequence
  Synthetic
ccgttttttttttttgccaatat

SEQ ID NO: 12554 - DNA, 23 bp, Artificial Sequence
  Synthetic
ccgttttttttttttcaagtgcc

SEQ ID NO: 12555 - DNA, 23 bp, Artificial Sequence
  Synthetic
ccgttttttttttttctacctgc

SEQ ID NO: 12556 - DNA, 23 bp, Artificial Sequence
  Synthetic
ccgttttttttttttctgcacta

SEQ ID NO: 12557 - DNA, 23 bp, Artificial Sequence
  Synthetic
ccgttttttttttttcacatgga

SEQ ID NO: 12558 - DNA, 23 bp, Artificial Sequence
  Synthetic
ccgttttttttttttccaacaac

SEQ ID NO: 12559 - DNA, 23 bp, Artificial Sequence
  Synthetic
ccgttttttttttttctgggtgg

SEQ ID NO: 12560 - DNA, 23 bp, Artificial Sequence
  Synthetic
ccgttttttttttttctagctcc

SEQ ID NO: 12561 - DNA, 23 bp, Artificial Sequence
  Synthetic
ccgttttttttttttagttttgc

SEQ ID NO: 12562 - DNA, 23 bp, Artificial Sequence
  Synthetic
ccgttttttttttttagttttgc

SEQ ID NO: 12563 - DNA, 23 bp, Artificial Sequence
  Synthetic
ccgttttttttttttcctgcact

SEQ ID NO: 12564 - DNA, 23 bp, Artificial Sequence
  Synthetic
ccgttttttttttttagactccg

SEQ ID NO: 12565 - DNA, 23 bp, Artificial Sequence
  Synthetic
ccgttttttttttttaacatcag

SEQ ID NO: 12566 - DNA, 23 bp, Artificial Sequence
  Synthetic
ccgttttttttttttgcctgtct

SEQ ID NO: 12567 - DNA, 23 bp, Artificial Sequence
  Synthetic
ccgttttttttttttcatggtta

SEQ ID NO: 12568 - DNA, 23 bp, Artificial Sequence
  Synthetic
ccgttttttttttttcagttctt

SEQ ID NO: 12569 - DNA, 23 bp, Artificial Sequence
  Synthetic
ccgttttttttttttagacccag

SEQ ID NO: 12570 - DNA, 23 bp, Artificial Sequence
  Synthetic
ccgttttttttttttgaaatccc

SEQ ID NO: 12571 - DNA, 23 bp, Artificial Sequence
  Synthetic
ccgttttttttttttgcggaact

SEQ ID NO: 12572 - DNA, 23 bp, Artificial Sequence
  Synthetic
ccgttttttttttttcaatagac

SEQ ID NO: 12573 - DNA, 23 bp, Artificial Sequence
  Synthetic
ccgttttttttttttaccgattt

SEQ ID NO: 12574 - DNA, 23 bp, Artificial Sequence
  Synthetic
ccgttttttttttttctgatttc

SEQ ID NO: 12575 - DNA, 23 bp, Artificial Sequence
  Synthetic
ccgttttttttttttctgagtgt

SEQ ID NO: 12576 - DNA, 23 bp, Artificial Sequence
  Synthetic
ccgttttttttttttcaaccagc

SEQ ID NO: 12577 - DNA, 23 bp, Artificial Sequence
  Synthetic
ccgttttttttttttatacagct

SEQ ID NO: 12578 - DNA, 23 bp, Artificial Sequence
  Synthetic
ccgttttttttttttcaggccgg

SEQ ID NO: 12579 - DNA, 23 bp, Artificial Sequence
  Synthetic
ccgttttttttttttacctgcac

SEQ ID NO: 12580 - DNA, 23 bp, Artificial Sequence
  Synthetic
ccgttttttttttttacaataca

SEQ ID NO: 12581 - DNA, 23 bp, Artificial Sequence
  Synthetic
ccgttttttttttttatcagctt

SEQ ID NO: 12582 - DNA, 23 bp, Artificial Sequence
  Synthetic
ccgttttttttttttccatactt

SEQ ID NO: 12583 - DNA, 23 bp, Artificial Sequence
  Synthetic
ccgttttttttttttccagtacc

SEQ ID NO: 12584 - DNA, 23 bp, Artificial Sequence
  Synthetic
ccgttttttttttttggcattca

SEQ ID NO: 12585 - DNA, 23 bp, Artificial Sequence
  Synthetic
ccgttttttttttttacaagtta

SEQ ID NO: 12586 - DNA, 23 bp, Artificial Sequence
  Synthetic
ccgttttttttttttcagctggt

SEQ ID NO: 12587 - DNA, 23 bp, Artificial Sequence
  Synthetic
ccgttttttttttttcccttatc

SEQ ID NO: 12588 - DNA, 23 bp, Artificial Sequence
  Synthetic
ccgttttttttttttctcatcaa

SEQ ID NO: 12589 - DNA, 23 bp, Artificial Sequence
  Synthetic
ccgttttttttttttgccgctgt

SEQ ID NO: 12590 - DNA, 23 bp, Artificial Sequence
  Synthetic
ccgttttttttttttaagaattg

SEQ ID NO: 12591 - DNA, 23 bp, Artificial Sequence
  Synthetic
ccgttttttttttttgaattctt

SEQ ID NO: 12592 - DNA, 23 bp, Artificial Sequence
  Synthetic
ccgttttttttttttgagcacgg

SEQ ID NO: 12593 - DNA, 23 bp, Artificial Sequence
  Synthetic
ccgttttttttttttcgtaccag

SEQ ID NO: 12594 - DNA, 23 bp, Artificial Sequence
  Synthetic
ccgttttttttttttaacggacg

SEQ ID NO: 12595 - DNA, 23 bp, Artificial Sequence
  Synthetic
ccgttttttttttttcaaagaga

SEQ ID NO: 12596 - DNA, 23 bp, Artificial Sequence
  Synthetic
ccgttttttttttttcagacaaa

SEQ ID NO: 12597 - DNA, 23 bp, Artificial Sequence
  Synthetic
ccgttttttttttttagagcacc

SEQ ID NO: 12598 - DNA, 23 bp, Artificial Sequence
  Synthetic
ccgttttttttttttctttctga

SEQ ID NO: 12599 - DNA, 23 bp, Artificial Sequence
  Synthetic
ccgttttttttttttctgagata

SEQ ID NO: 12600 - DNA, 23 bp, Artificial Sequence
  Synthetic
ccgttttttttttttcaacaaaa

SEQ ID NO: 12601 - DNA, 23 bp, Artificial Sequence
  Synthetic
ccgttttttttttttacatcttt

SEQ ID NO: 12602 - DNA, 23 bp, Artificial Sequence
  Synthetic
ccgttttttttttttatacagct

SEQ ID NO: 12603 - DNA, 23 bp, Artificial Sequence
  Synthetic
ccgttttttttttttataaagct

SEQ ID NO: 12604 - DNA, 23 bp, Artificial Sequence
  Synthetic
ccgttttttttttttaggataca

SEQ ID NO: 12605 - DNA, 23 bp, Artificial Sequence
  Synthetic
ccgttttttttttttgctcactc

SEQ ID NO: 12606 - DNA, 23 bp, Artificial Sequence
  Synthetic
ccgttttttttttttgctcactc

SEQ ID NO: 12607 - DNA, 23 bp, Artificial Sequence
  Synthetic
ccgttttttttttttgctcactc

SEQ ID NO: 12608 - DNA, 23 bp, Artificial Sequence
  Synthetic
ccgttttttttttttgctcactc

SEQ ID NO: 12609 - DNA, 23 bp, Artificial Sequence
  Synthetic
ccgttttttttttttgctcactc

SEQ ID NO: 12610 - DNA, 23 bp, Artificial Sequence
  Synthetic
ccgttttttttttttgctcactc

SEQ ID NO: 12611 - DNA, 23 bp, Artificial Sequence
  Synthetic
ccgttttttttttttgctcactc

SEQ ID NO: 12612 - DNA, 23 bp, Artificial Sequence
  Synthetic
ccgttttttttttttgctctctt

SEQ ID NO: 12613 - DNA, 23 bp, Artificial Sequence
  Synthetic
ccgttttttttttttgctctcta

SEQ ID NO: 12614 - DNA, 23 bp, Artificial Sequence
  Synthetic
ccgttttttttttttgctctcta

SEQ ID NO: 12615 - DNA, 23 bp, Artificial Sequence
  Synthetic
ccgttttttttttttgctctcta

SEQ ID NO: 12616 - DNA, 23 bp, Artificial Sequence
  Synthetic
ccgttttttttttttgctctcta

SEQ ID NO: 12617 - DNA, 23 bp, Artificial Sequence
  Synthetic
ccgttttttttttttctttgtct

SEQ ID NO: 12618 - DNA, 23 bp, Artificial Sequence
  Synthetic
ccgttttttttttttctttgtct

SEQ ID NO: 12619 - DNA, 23 bp, Artificial Sequence
  Synthetic
ccgttttttttttttgagctccc

SEQ ID NO: 12620 - DNA, 23 bp, Artificial Sequence
  Synthetic
ccgttttttttttttagagctcc

SEQ ID NO: 12621 - DNA, 23 bp, Artificial Sequence
  Synthetic
ccgttttttttttttggagctcc

SEQ ID NO: 12622 - DNA, 23 bp, Artificial Sequence
  Synthetic
ccgttttttttttttgcatacag

SEQ ID NO: 12623 - DNA, 23 bp, Artificial Sequence
  Synthetic
ccgttttttttttttgcatacag

SEQ ID NO: 12624 - DNA, 23 bp, Artificial Sequence
  Synthetic
ccgttttttttttttgcatacag

SEQ ID NO: 12625 - DNA, 23 bp, Artificial Sequence
  Synthetic
ccgttttttttttttcccgatgt

SEQ ID NO: 12626 - DNA, 23 bp, Artificial Sequence
  Synthetic
ccgttttttttttttggatgcag

SEQ ID NO: 12627 - DNA, 23 bp, Artificial Sequence
  Synthetic
ccgttttttttttttggatgcag

SEQ ID NO: 12628 - DNA, 23 bp, Artificial Sequence
  Synthetic
ccgttttttttttttcgaagttc

SEQ ID NO: 12629 - DNA, 23 bp, Artificial Sequence
  Synthetic
ccgttttttttttttcacgtgcc

SEQ ID NO: 12630 - DNA, 23 bp, Artificial Sequence
  Synthetic
ccgttttttttttttcacgtgcc

SEQ ID NO: 12631 - DNA, 23 bp, Artificial Sequence
  Synthetic
ccgttttttttttttgcacgtgc

SEQ ID NO: 12632 - DNA, 23 bp, Artificial Sequence
  Synthetic
ccgttttttttttttggggatga

SEQ ID NO: 12633 - DNA, 23 bp, Artificial Sequence
  Synthetic
ccgttttttttttttggggatga

SEQ ID NO: 12634 - DNA, 23 bp, Artificial Sequence
  Synthetic
ccgttttttttttttgggaatga

SEQ ID NO: 12635 - DNA, 23 bp, Artificial Sequence
  Synthetic
ccgttttttttttttgggaatga

SEQ ID NO: 12636 - DNA, 23 bp, Artificial Sequence
  Synthetic
ccgttttttttttttgggaatga

SEQ ID NO: 12637 - DNA, 23 bp, Artificial Sequence
  Synthetic
ccgttttttttttttgggaatga

SEQ ID NO: 12638 - DNA, 23 bp, Artificial Sequence
  Synthetic
ccgttttttttttttgggaatga

SEQ ID NO: 12639 - DNA, 23 bp, Artificial Sequence
  Synthetic
ccgttttttttttttgggaatga

SEQ ID NO: 12640 - DNA, 23 bp, Artificial Sequence
  Synthetic
ccgttttttttttttgggaatga

SEQ ID NO: 12641 - DNA, 23 bp, Artificial Sequence
  Synthetic
ccgttttttttttttgatcatgc

SEQ ID NO: 12642 - DNA, 23 bp, Artificial Sequence
  Synthetic
ccgttttttttttttgatcatgc

SEQ ID NO: 12643 - DNA, 23 bp, Artificial Sequence
  Synthetic
ccgttttttttttttagatcatg

SEQ ID NO: 12644 - DNA, 23 bp, Artificial Sequence
  Synthetic
ccgttttttttttttcagatcat

SEQ ID NO: 12645 - DNA, 23 bp, Artificial Sequence
  Synthetic
ccgttttttttttttccgacctg

SEQ ID NO: 12646 - DNA, 23 bp, Artificial Sequence
  Synthetic
ccgttttttttttttccgacctg

SEQ ID NO: 12647 - DNA, 23 bp, Artificial Sequence
  Synthetic
ccgttttttttttttggcaagtc

SEQ ID NO: 12648 - DNA, 23 bp, Artificial Sequence
  Synthetic
ccgttttttttttttcggcaagt

SEQ ID NO: 12649 - DNA, 23 bp, Artificial Sequence
  Synthetic
ccgttttttttttttcggcaagt

SEQ ID NO: 12650 - DNA, 23 bp, Artificial Sequence
  Synthetic
ccgttttttttttttggcaagtc

SEQ ID NO: 12651 - DNA, 23 bp, Artificial Sequence
  Synthetic
ccgttttttttttttggcaagtc

SEQ ID NO: 12652 - DNA, 23 bp, Artificial Sequence
  Synthetic
ccgttttttttttttggcaagtc

SEQ ID NO: 12653 - DNA, 23 bp, Artificial Sequence
  Synthetic
ccgttttttttttttggcaagtc

SEQ ID NO: 12654 - DNA, 23 bp, Artificial Sequence
  Synthetic
ccgttttttttttttgccaaggt

SEQ ID NO: 12655 - DNA, 23 bp, Artificial Sequence
  Synthetic
ccgttttttttttttaggcaagt

SEQ ID NO: 12656 - DNA, 23 bp, Artificial Sequence
  Synthetic
ccgttttttttttttaggcaagt

SEQ ID NO: 12657 - DNA, 23 bp, Artificial Sequence
  Synthetic
ccgttttttttttttaggcaagt

SEQ ID NO: 12658 - DNA, 23 bp, Artificial Sequence
  Synthetic
ccgttttttttttttaggcaagt

SEQ ID NO: 12659 - DNA, 23 bp, Artificial Sequence
  Synthetic
ccgttttttttttttaggcaagt

SEQ ID NO: 12660 - DNA, 23 bp, Artificial Sequence
  Synthetic
ccgttttttttttttaggcaagt

SEQ ID NO: 12661 - DNA, 23 bp, Artificial Sequence
  Synthetic
ccgttttttttttttaggcaagt

SEQ ID NO: 12662 - DNA, 23 bp, Artificial Sequence
  Synthetic
ccgttttttttttttatattgac

SEQ ID NO: 12663 - DNA, 23 bp, Artificial Sequence
  Synthetic
ccgttttttttttttatattggc

SEQ ID NO: 12664 - DNA, 23 bp, Artificial Sequence
  Synthetic
ccgttttttttttttgtgatatt

SEQ ID NO: 12665 - DNA, 23 bp, Artificial Sequence
  Synthetic
ccgttttttttttttgtgatatt

SEQ ID NO: 12666 - DNA, 23 bp, Artificial Sequence
  Synthetic
ccgttttttttttttgcagcatc

SEQ ID NO: 12667 - DNA, 23 bp, Artificial Sequence
  Synthetic
ccgttttttttttttgcagcatc

SEQ ID NO: 12668 - DNA, 23 bp, Artificial Sequence
  Synthetic
ccgttttttttttttgaatctta

SEQ ID NO: 12669 - DNA, 23 bp, Artificial Sequence
  Synthetic
ccgttttttttttttgcagcatc

SEQ ID NO: 12670 - DNA, 23 bp, Artificial Sequence
  Synthetic
ccgttttttttttttgcagcatc

SEQ ID NO: 12671 - DNA, 23 bp, Artificial Sequence
  Synthetic
ccgttttttttttttgcagcatc

SEQ ID NO: 12672 - DNA, 23 bp, Artificial Sequence
  Synthetic
ccgttttttttttttgatttctc

SEQ ID NO: 12673 - DNA, 23 bp, Artificial Sequence
  Synthetic
ccgttttttttttttggagctcc

SEQ ID NO: 12674 - DNA, 23 bp, Artificial Sequence
  Synthetic
ccgttttttttttttggagctcc

SEQ ID NO: 12675 - DNA, 23 bp, Artificial Sequence
  Synthetic
ccgttttttttttttggagctcc

SEQ ID NO: 12676 - DNA, 23 bp, Artificial Sequence
  Synthetic
ccgttttttttttttgcgctatc

SEQ ID NO: 12677 - DNA, 23 bp, Artificial Sequence
  Synthetic
ccgttttttttttttgcgctatc

SEQ ID NO: 12678 - DNA, 23 bp, Artificial Sequence
  Synthetic
ccgttttttttttttgcgctatc

SEQ ID NO: 12679 - DNA, 23 bp, Artificial Sequence
  Synthetic
ccgttttttttttttatcaatgc

SEQ ID NO: 12680 - DNA, 23 bp, Artificial Sequence
  Synthetic
ccgttttttttttttatcaatgc

SEQ ID NO: 12681 - DNA, 23 bp, Artificial Sequence
  Synthetic
ccgttttttttttttgaggtgga

SEQ ID NO: 12682 - DNA, 23 bp, Artificial Sequence
  Synthetic
ccgttttttttttttgaggtgga

SEQ ID NO: 12683 - DNA, 23 bp, Artificial Sequence
  Synthetic
ccgttttttttttttagttcccc

SEQ ID NO: 12684 - DNA, 23 bp, Artificial Sequence
  Synthetic
ccgttttttttttttagtccccc

SEQ ID NO: 12685 - DNA, 23 bp, Artificial Sequence
  Synthetic
ccgttttttttttttagtccccc

SEQ ID NO: 12686 - DNA, 23 bp, Artificial Sequence
  Synthetic
ccgttttttttttttagttcccc

SEQ ID NO: 12687 - DNA, 23 bp, Artificial Sequence
  Synthetic
ccgttttttttttttagttcccc

SEQ ID NO: 12688 - DNA, 23 bp, Artificial Sequence
  Synthetic
ccgttttttttttttagtccccc

SEQ ID NO: 12689 - DNA, 23 bp, Artificial Sequence
  Synthetic
ccgttttttttttttagttcaag

SEQ ID NO: 12690 - DNA, 23 bp, Artificial Sequence
  Synthetic
ccgttttttttttttagttcaag

SEQ ID NO: 12691 - DNA, 23 bp, Artificial Sequence
  Synthetic
ccgttttttttttttatcaacgc

SEQ ID NO: 12692 - DNA, 23 bp, Artificial Sequence
  Synthetic
ccgttttttttttttatcaacga

SEQ ID NO: 12693 - DNA, 23 bp, Artificial Sequence
  Synthetic
ccgttttttttttttaggggtga

SEQ ID NO: 12694 - DNA, 23 bp, Artificial Sequence
  Synthetic
ccgttttttttttttaggggtga

SEQ ID NO: 12695 - DNA, 23 bp, Artificial Sequence
  Synthetic
ccgttttttttttttaggggtga

SEQ ID NO: 12696 - DNA, 23 bp, Artificial Sequence
  Synthetic
ccgttttttttttttagggcaaa

SEQ ID NO: 12697 - DNA, 23 bp, Artificial Sequence
  Synthetic
ccgttttttttttttagggcaac

SEQ ID NO: 12698 - DNA, 23 bp, Artificial Sequence
  Synthetic
ccgttttttttttttagggcaac

SEQ ID NO: 12699 - DNA, 23 bp, Artificial Sequence
  Synthetic
ccgttttttttttttggggcaaa

SEQ ID NO: 12700 - DNA, 23 bp, Artificial Sequence
  Synthetic
ccgttttttttttttgaggcaaa

SEQ ID NO: 12701 - DNA, 23 bp, Artificial Sequence
  Synthetic
ccgttttttttttttcgggcaaa

SEQ ID NO: 12702 - DNA, 23 bp, Artificial Sequence
  Synthetic
ccgttttttttttttgacttata

SEQ ID NO: 12703 - DNA, 23 bp, Artificial Sequence
  Synthetic
ccgttttttttttttcggtcgac

SEQ ID NO: 12704 - DNA, 23 bp, Artificial Sequence
  Synthetic
ccgttttttttttttagaggttt

SEQ ID NO: 12705 - DNA, 23 bp, Artificial Sequence
  Synthetic
ccgttttttttttttgagtttgt

SEQ ID NO: 12706 - DNA, 23 bp, Artificial Sequence
  Synthetic
ccgttttttttttttctgccgca

SEQ ID NO: 12707 - DNA, 23 bp, Artificial Sequence
  Synthetic
ccgttttttttttttgttatggg

SEQ ID NO: 12708 - DNA, 23 bp, Artificial Sequence
  Synthetic
ccgttttttttttttgttatggg

SEQ ID NO: 12709 - DNA, 23 bp, Artificial Sequence
  Synthetic
ccgttttttttttttgttatggg

SEQ ID NO: 12710 - DNA, 23 bp, Artificial Sequence
  Synthetic
ccgttttttttttttggattaca

SEQ ID NO: 12711 - DNA, 23 bp, Artificial Sequence
  Synthetic
ccgttttttttttttccaaaagt

SEQ ID NO: 12712 - DNA, 23 bp, Artificial Sequence
  Synthetic
ccgttttttttttttccagggaa

SEQ ID NO: 12713 - DNA, 23 bp, Artificial Sequence
  Synthetic
ccgttttttttttttgcagaaca

SEQ ID NO: 12714 - DNA, 23 bp, Artificial Sequence
  Synthetic
ccgttttttttttttacgatgat

SEQ ID NO: 12715 - DNA, 23 bp, Artificial Sequence
  Synthetic
ccgttttttttttttgttctgtt

SEQ ID NO: 12716 - DNA, 23 bp, Artificial Sequence
  Synthetic
ccgttttttttttttaacagtgt

SEQ ID NO: 12717 - DNA, 23 bp, Artificial Sequence
  Synthetic
ccgttttttttttttgaacaaat

SEQ ID NO: 12718 - DNA, 23 bp, Artificial Sequence
  Synthetic
ccgttttttttttttgtcagttc

SEQ ID NO: 12719 - DNA, 23 bp, Artificial Sequence
  Synthetic
ccgttttttttttttaacatcct

SEQ ID NO: 12720 - DNA, 23 bp, Artificial Sequence
  Synthetic
ccgttttttttttttcatttccg

SEQ ID NO: 12721 - DNA, 23 bp, Artificial Sequence
  Synthetic
ccgttttttttttttgtaaggac

SEQ ID NO: 12722 - DNA, 23 bp, Artificial Sequence
  Synthetic
ccgttttttttttttaacaaaac

SEQ ID NO: 12723 - DNA, 23 bp, Artificial Sequence
  Synthetic
ccgttttttttttttaacaaaac

SEQ ID NO: 12724 - DNA, 23 bp, Artificial Sequence
  Synthetic
ccgttttttttttttaacaaaag

SEQ ID NO: 12725 - DNA, 23 bp, Artificial Sequence
  Synthetic
ccgttttttttttttagggctac

SEQ ID NO: 12726 - DNA, 23 bp, Artificial Sequence
  Synthetic
ccgttttttttttttatgggcgg

SEQ ID NO: 12727 - DNA, 23 bp, Artificial Sequence
  Synthetic
ccgttttttttttttagacaaaa

SEQ ID NO: 12728 - DNA, 23 bp, Artificial Sequence
  Synthetic
ccgttttttttttttatggccat

SEQ ID NO: 12729 - DNA, 23 bp, Artificial Sequence
  Synthetic
ccgttttttttttttgcactgct

SEQ ID NO: 12730 - DNA, 23 bp, Artificial Sequence
  Synthetic
ccgttttttttttttacatcaat

SEQ ID NO: 12731 - DNA, 23 bp, Artificial Sequence
  Synthetic
ccgttttttttttttgcaacgaa

SEQ ID NO: 12732 - DNA, 23 bp, Artificial Sequence
  Synthetic
ccgttttttttttttggtgtaca

SEQ ID NO: 12733 - DNA, 23 bp, Artificial Sequence
  Synthetic
ccgttttttttttttgagcagca

SEQ ID NO: 12734 - DNA, 23 bp, Artificial Sequence
  Synthetic
ccgttttttttttttccagatat

SEQ ID NO: 12735 - DNA, 23 bp, Artificial Sequence
  Synthetic
ccgttttttttttttagtatcca

SEQ ID NO: 12736 - DNA, 23 bp, Artificial Sequence
  Synthetic
ccgttttttttttttagaacatc

SEQ ID NO: 12737 - DNA, 23 bp, Artificial Sequence
  Synthetic
ccgttttttttttttaacatgaa

SEQ ID NO: 12738 - DNA, 23 bp, Artificial Sequence
  Synthetic
ccgttttttttttttctatacaa

SEQ ID NO: 12739 - DNA, 23 bp, Artificial Sequence
  Synthetic
ccgttttttttttttccatactt

SEQ ID NO: 12740 - DNA, 23 bp, Artificial Sequence
  Synthetic
ccgttttttttttttcaaattcg

SEQ ID NO: 12741 - DNA, 23 bp, Artificial Sequence
  Synthetic
ccgttttttttttttggcattca

SEQ ID NO: 12742 - DNA, 23 bp, Artificial Sequence
  Synthetic
ccgttttttttttttggagagag

SEQ ID NO: 12743 - DNA, 23 bp, Artificial Sequence
  Synthetic
ccgttttttttttttgaattctt

SEQ ID NO: 12744 - DNA, 23 bp, Artificial Sequence
  Synthetic
ccgttttttttttttgaattctc

SEQ ID NO: 12745 - DNA, 23 bp, Artificial Sequence
  Synthetic
ccgttttttttttttgcgcgcta

SEQ ID NO: 12746 - DNA, 23 bp, Artificial Sequence
  Synthetic
ccgttttttttttttgtaggaac

SEQ ID NO: 12747 - DNA, 23 bp, Artificial Sequence
  Synthetic
ccgttttttttttttcgtaccag

SEQ ID NO: 12748 - DNA, 23 bp, Artificial Sequence
  Synthetic
ccgttttttttttttgagtgtgg

SEQ ID NO: 12749 - DNA, 23 bp, Artificial Sequence
  Synthetic
ccgttttttttttttcagacaaa

SEQ ID NO: 12750 - DNA, 23 bp, Artificial Sequence
  Synthetic
ccgttttttttttttgaattacc

SEQ ID NO: 12751 - DNA, 23 bp, Artificial Sequence
  Synthetic
ccgttttttttttttagagcacc

SEQ ID NO: 12752 - DNA, 23 bp, Artificial Sequence
  Synthetic
ccgttttttttttttcactcaag

SEQ ID NO: 12753 - DNA, 23 bp, Artificial Sequence
  Synthetic
ccgttttttttttttagctatgc

SEQ ID NO: 12754 - DNA, 23 bp, Artificial Sequence
  Synthetic
ccgttttttttttttaaccagct

SEQ ID NO: 12755 - DNA, 23 bp, Artificial Sequence
  Synthetic
ccgttttttttttttcaacaaaa

SEQ ID NO: 12756 - DNA, 23 bp, Artificial Sequence
  Synthetic
ccgttttttttttttactaccca

SEQ ID NO: 12757 - DNA, 23 bp, Artificial Sequence
  Synthetic
ccgttttttttttttacatcttt

SEQ ID NO: 12758 - DNA, 23 bp, Artificial Sequence
  Synthetic
ccgttttttttttttatacagct

SEQ ID NO: 12759 - DNA, 23 bp, Artificial Sequence
  Synthetic
ccgttttttttttttactataca

SEQ ID NO: 12760 - DNA, 23 bp, Artificial Sequence
  Synthetic
ccgttttttttttttactatgca

SEQ ID NO: 12761 - DNA, 23 bp, Artificial Sequence
  Synthetic
ccgttttttttttttactataca

SEQ ID NO: 12762 - DNA, 23 bp, Artificial Sequence
  Synthetic
ccgttttttttttttactgtaca

SEQ ID NO: 12763 - DNA, 23 bp, Artificial Sequence
  Synthetic
ccgttttttttttttacagcaca

SEQ ID NO: 12764 - DNA, 23 bp, Artificial Sequence
  Synthetic
ccgttttttttttttagttatca

SEQ ID NO: 12765 - DNA, 23 bp, Artificial Sequence
  Synthetic
ccgttttttttttttatagccct

SEQ ID NO: 12766 - DNA, 23 bp, Artificial Sequence
  Synthetic
ccgttttttttttttcctgcact

SEQ ID NO: 12767 - DNA, 23 bp, Artificial Sequence
  Synthetic
ccgttttttttttttatagccct

SEQ ID NO: 12768 - DNA, 23 bp, Artificial Sequence
  Synthetic
ccgttttttttttttacaaattc

SEQ ID NO: 12769 - DNA, 23 bp, Artificial Sequence
  Synthetic
ccgttttttttttttacaaattc

SEQ ID NO: 12770 - DNA, 23 bp, Artificial Sequence
  Synthetic
ccgttttttttttttaaacacca

SEQ ID NO: 12771 - DNA, 23 bp, Artificial Sequence
  Synthetic
ccgttttttttttttgcattcac

SEQ ID NO: 12772 - DNA, 23 bp, Artificial Sequence
  Synthetic
ccgttttttttttttacaggtta

SEQ ID NO: 12773 - DNA, 23 bp, Artificial Sequence
  Synthetic
ccgttttttttttttacaagtta

SEQ ID NO: 12774 - DNA, 23 bp, Artificial Sequence
  Synthetic
ccgttttttttttttgcattatt

SEQ ID NO: 12775 - DNA, 23 bp, Artificial Sequence
  Synthetic
ccgttttttttttttgccaagct

SEQ ID NO: 12776 - DNA, 23 bp, Artificial Sequence
  Synthetic
ccgttttttttttttaaagagac

SEQ ID NO: 12777 - DNA, 23 bp, Artificial Sequence
  Synthetic
ccgttttttttttttgaccatgg

SEQ ID NO: 12778 - DNA, 23 bp, Artificial Sequence
  Synthetic
ccgttttttttttttggcctgat

SEQ ID NO: 12779 - DNA, 23 bp, Artificial Sequence
  Synthetic
ccgttttttttttttctggagac

SEQ ID NO: 12780 - DNA, 23 bp, Artificial Sequence
  Synthetic
ccgttttttttttttcgtggttc

SEQ ID NO: 12781 - DNA, 23 bp, Artificial Sequence
  Synthetic
ccgttttttttttttagtgcttt

SEQ ID NO: 12782 - DNA, 23 bp, Artificial Sequence
  Synthetic
ccgttttttttttttatccataa

SEQ ID NO: 12783 - DNA, 23 bp, Artificial Sequence
  Synthetic
ccgttttttttttttgggattcc

SEQ ID NO: 12784 - DNA, 23 bp, Artificial Sequence
  Synthetic
ccgttttttttttttcaaagttc

SEQ ID NO: 12785 - DNA, 23 bp, Artificial Sequence
  Synthetic
ccgttttttttttttcaaagttc

SEQ ID NO: 12786 - DNA, 23 bp, Artificial Sequence
  Synthetic
ccgttttttttttttcactggta

SEQ ID NO: 12787 - DNA, 23 bp, Artificial Sequence
  Synthetic
ccgttttttttttttctcaagga

SEQ ID NO: 12788 - DNA, 23 bp, Artificial Sequence
  Synthetic
ccgttttttttttttctagactg

SEQ ID NO: 12789 - DNA, 23 bp, Artificial Sequence
  Synthetic
ccgttttttttttttaaaccatg

SEQ ID NO: 12790 - DNA, 23 bp, Artificial Sequence
  Synthetic
ccgttttttttttttccaatatt

SEQ ID NO: 12791 - DNA, 23 bp, Artificial Sequence
  Synthetic
ccgttttttttttttcaagtgcc

SEQ ID NO: 12792 - DNA, 23 bp, Artificial Sequence
  Synthetic
ccgttttttttttttctacctgc

SEQ ID NO: 12793 - DNA, 23 bp, Artificial Sequence
  Synthetic
ccgttttttttttttactcaccg

SEQ ID NO: 12794 - DNA, 23 bp, Artificial Sequence
  Synthetic
ccgttttttttttttaacccacc

SEQ ID NO: 12795 - DNA, 23 bp, Artificial Sequence
  Synthetic
ccgttttttttttttaactcacc

SEQ ID NO: 12796 - DNA, 23 bp, Artificial Sequence
  Synthetic
ccgttttttttttttgcccaaaa

SEQ ID NO: 12797 - DNA, 23 bp, Artificial Sequence
  Synthetic
ccgttttttttttttctgcacta

SEQ ID NO: 12798 - DNA, 23 bp, Artificial Sequence
  Synthetic
ccgttttttttttttactgcact

SEQ ID NO: 12799 - DNA, 23 bp, Artificial Sequence
  Synthetic
ccgttttttttttttagctgctt

SEQ ID NO: 12800 - DNA, 23 bp, Artificial Sequence
  Synthetic
ccgttttttttttttggctgtca

SEQ ID NO: 12801 - DNA, 23 bp, Artificial Sequence
  Synthetic
ccgttttttttttttctgggact

SEQ ID NO: 12802 - DNA, 23 bp, Artificial Sequence
  Synthetic
ccgttttttttttttatctcgcc

SEQ ID NO: 12803 - DNA, 23 bp, Artificial Sequence
  Synthetic
ccgttttttttttttacaggtag

SEQ ID NO: 12804 - DNA, 23 bp, Artificial Sequence
  Synthetic
ccgttttttttttttaccaatgt

SEQ ID NO: 12805 - DNA, 23 bp, Artificial Sequence
  Synthetic
ccgttttttttttttaacagata

SEQ ID NO: 12806 - DNA, 23 bp, Artificial Sequence
  Synthetic
ccgttttttttttttacatcgtt

SEQ ID NO: 12807 - DNA, 23 bp, Artificial Sequence
  Synthetic
ccgttttttttttttatcattac

SEQ ID NO: 12808 - DNA, 23 bp, Artificial Sequence
  Synthetic
ccgttttttttttttcatcatta

SEQ ID NO: 12809 - DNA, 23 bp, Artificial Sequence
  Synthetic
ccgttttttttttttagactccg

SEQ ID NO: 12810 - DNA, 23 bp, Artificial Sequence
  Synthetic
ccgttttttttttttacctgcac

SEQ ID NO: 12811 - DNA, 23 bp, Artificial Sequence
  Synthetic
ccgttttttttttttcctgcact

SEQ ID NO: 12812 - DNA, 23 bp, Artificial Sequence
  Synthetic
ccgttttttttttttgtcaacat

SEQ ID NO: 12813 - DNA, 23 bp, Artificial Sequence
  Synthetic
ccgttttttttttttgacagccc

SEQ ID NO: 12814 - DNA, 23 bp, Artificial Sequence
  Synthetic
ccgttttttttttttagccgctg

SEQ ID NO: 12815 - DNA, 23 bp, Artificial Sequence
  Synthetic
ccgttttttttttttctgcctgt

SEQ ID NO: 12816 - DNA, 23 bp, Artificial Sequence
  Synthetic
ccgttttttttttttctgtcaat

SEQ ID NO: 12817 - DNA, 23 bp, Artificial Sequence
  Synthetic
ccgttttttttttttcatggtta

SEQ ID NO: 12818 - DNA, 23 bp, Artificial Sequence
  Synthetic
ccgttttttttttttaagcttgc

SEQ ID NO: 12819 - DNA, 23 bp, Artificial Sequence
  Synthetic
ccgttttttttttttaacccagc

SEQ ID NO: 12820 - DNA, 23 bp, Artificial Sequence
  Synthetic
ccgttttttttttttcccagtag

SEQ ID NO: 12821 - DNA, 23 bp, Artificial Sequence
  Synthetic
ccgttttttttttttgaaatccc

SEQ ID NO: 12822 - DNA, 23 bp, Artificial Sequence
  Synthetic
ccgttttttttttttggtaatcc

SEQ ID NO: 12823 - DNA, 23 bp, Artificial Sequence
  Synthetic
ccgttttttttttttgttcctgc

SEQ ID NO: 12824 - DNA, 23 bp, Artificial Sequence
  Synthetic
ccgttttttttttttagaccgag

SEQ ID NO: 12825 - DNA, 23 bp, Artificial Sequence
  Synthetic
ccgttttttttttttgcctatcc

SEQ ID NO: 12826 - DNA, 23 bp, Artificial Sequence
  Synthetic
ccgttttttttttttacctatcc

SEQ ID NO: 12827 - DNA, 23 bp, Artificial Sequence
  Synthetic
ccgttttttttttttggaactta

SEQ ID NO: 12828 - DNA, 23 bp, Artificial Sequence
  Synthetic
ccgttttttttttttcagaactt

SEQ ID NO: 12829 - DNA, 23 bp, Artificial Sequence
  Synthetic
ccgttttttttttttaccgattt

SEQ ID NO: 12830 - DNA, 23 bp, Artificial Sequence
  Synthetic
ccgttttttttttttaacactga

SEQ ID NO: 12831 - DNA, 23 bp, Artificial Sequence
  Synthetic
ccgttttttttttttaccgattt

SEQ ID NO: 12832 - DNA, 23 bp, Artificial Sequence
  Synthetic
ccgttttttttttttgcttccag

SEQ ID NO: 12833 - DNA, 23 bp, Artificial Sequence
  Synthetic
ccgttttttttttttgctgagtg

SEQ ID NO: 12834 - DNA, 23 bp, Artificial Sequence
  Synthetic
ccgttttttttttttctgagagt

SEQ ID NO: 12835 - DNA, 23 bp, Artificial Sequence
  Synthetic
ccgttttttttttttgcttccag

SEQ ID NO: 12836 - DNA, 23 bp, Artificial Sequence
  Synthetic
ccgttttttttttttgcttccag

SEQ ID NO: 12837 - DNA, 23 bp, Artificial Sequence
  Synthetic
ccgttttttttttttgctatgcc

SEQ ID NO: 12838 - DNA, 23 bp, Artificial Sequence
  Synthetic
ccgttttttttttttgccctctc

SEQ ID NO: 12839 - DNA, 23 bp, Artificial Sequence
  Synthetic
ccgttttttttttttgatgggtg

SEQ ID NO: 12840 - DNA, 23 bp, Artificial Sequence
  Synthetic
ccgttttttttttttgcactgga

SEQ ID NO: 12841 - DNA, 23 bp, Artificial Sequence
  Synthetic
ccgttttttttttttaatcagct

SEQ ID NO: 12842 - DNA, 23 bp, Artificial Sequence
  Synthetic
ccgttttttttttttaatcagct

SEQ ID NO: 12843 - DNA, 23 bp, Artificial Sequence
  Synthetic
ccgttttttttttttacccctgg

SEQ ID NO: 12844 - DNA, 23 bp, Artificial Sequence
  Synthetic
ccgttttttttttttgcagatgg

SEQ ID NO: 12845 - DNA, 23 bp, Artificial Sequence
  Synthetic
ccgttttttttttttaagatcaa

SEQ ID NO: 12846 - DNA, 23 bp, Artificial Sequence
  Synthetic
ccgttttttttttttcgaatata

SEQ ID NO: 12847 - DNA, 23 bp, Artificial Sequence
  Synthetic
ccgttttttttttttgacgtgga

SEQ ID NO: 12848 - DNA, 23 bp, Artificial Sequence
  Synthetic
ccgttttttttttttcgcatgtt

SEQ ID NO: 12849 - DNA, 23 bp, Artificial Sequence
  Synthetic
ccgttttttttttttctgagggg

SEQ ID NO: 12850 - DNA, 23 bp, Artificial Sequence
  Synthetic
ccgttttttttttttggcggaca

SEQ ID NO: 12851 - DNA, 23 bp, Artificial Sequence
  Synthetic
ccgttttttttttttaacgggag

SEQ ID NO: 12852 - DNA, 23 bp, Artificial Sequence
  Synthetic
ccgttttttttttttattaggaa

SEQ ID NO: 12853 - DNA, 23 bp, Artificial Sequence
  Synthetic
ccgttttttttttttatgtagtc

SEQ ID NO: 12854 - DNA, 23 bp, Artificial Sequence
  Synthetic
ccgttttttttttttgtgtatat

SEQ ID NO: 12855 - DNA, 23 bp, Artificial Sequence
  Synthetic
ccgttttttttttttcgggaggg

SEQ ID NO: 12856 - DNA, 23 bp, Artificial Sequence
  Synthetic
ccgttttttttttttctggatgt

SEQ ID NO: 12857 - DNA, 23 bp, Artificial Sequence
  Synthetic
ccgttttttttttttagtggatg

SEQ ID NO: 12858 - DNA, 23 bp, Artificial Sequence
  Synthetic
ccgttttttttttttaacatcac

SEQ ID NO: 12859 - DNA, 23 bp, Artificial Sequence
  Synthetic
ccgttttttttttttcggtccta

SEQ ID NO: 12860 - DNA, 23 bp, Artificial Sequence
  Synthetic
ccgttttttttttttatccaata

SEQ ID NO: 12861 - DNA, 23 bp, Artificial Sequence
  Synthetic
ccgttttttttttttacacaata

SEQ ID NO: 12862 - DNA, 23 bp, Artificial Sequence
  Synthetic
ccgttttttttttttacaacaaa

SEQ ID NO: 12863 - DNA, 23 bp, Artificial Sequence
  Synthetic
ccgttttttttttttcaggccgg

SEQ ID NO: 12864 - DNA, 23 bp, Artificial Sequence
  Synthetic
ccgttttttttttttcctgcacg

SEQ ID NO: 12865 - DNA, 23 bp, Artificial Sequence
  Synthetic
ccgttttttttttttacaataca

SEQ ID NO: 12866 - DNA, 23 bp, Artificial Sequence
  Synthetic
ccgttttttttttttcaagatcg

SEQ ID NO: 12867 - DNA, 23 bp, Artificial Sequence
  Synthetic
ccgttttttttttttactataca

SEQ ID NO: 12868 - DNA, 23 bp, Artificial Sequence
  Synthetic
ccgttttttttttttacacttga

SEQ ID NO: 12869 - DNA, 23 bp, Artificial Sequence
  Synthetic
ccgttttttttttttggaatgcg

SEQ ID NO: 12870 - DNA, 23 bp, Artificial Sequence
  Synthetic
ccgttttttttttttcatacttc

SEQ ID NO: 12871 - DNA, 23 bp, Artificial Sequence
  Synthetic
ccgttttttttttttgcattcac

SEQ ID NO: 12872 - DNA, 23 bp, Artificial Sequence
  Synthetic
ccgttttttttttttcgtgaatt

SEQ ID NO: 12873 - DNA, 23 bp, Artificial Sequence
  Synthetic
ccgttttttttttttctggtcgc

SEQ ID NO: 12874 - DNA, 23 bp, Artificial Sequence
  Synthetic
ccgttttttttttttctgcctgt

SEQ ID NO: 12875 - DNA, 23 bp, Artificial Sequence
  Synthetic
ccgttttttttttttaccgcagt

SEQ ID NO: 12876 - DNA, 23 bp, Artificial Sequence
  Synthetic
ccgttttttttttttccgcacat

SEQ ID NO: 12877 - DNA, 23 bp, Artificial Sequence
  Synthetic
ccgttttttttttttagggtatt

SEQ ID NO: 12878 - DNA, 23 bp, Artificial Sequence
  Synthetic
ccgttttttttttttgcgtcatt

SEQ ID NO: 12879 - DNA, 23 bp, Artificial Sequence
  Synthetic
ccgttttttttttttcagtacct

SEQ ID NO: 12880 - DNA, 23 bp, Artificial Sequence
  Synthetic
ccgttttttttttttagtacttt

SEQ ID NO: 12881 - DNA, 23 bp, Artificial Sequence
  Synthetic
ccgttttttttttttgcgaaaat

SEQ ID NO: 12882 - DNA, 23 bp, Artificial Sequence
  Synthetic
ccgttttttttttttatttctca

SEQ ID NO: 12883 - DNA, 23 bp, Artificial Sequence
  Synthetic
ccgttttttttttttataccact

SEQ ID NO: 12884 - DNA, 23 bp, Artificial Sequence
  Synthetic
ccgttttttttttttagctactt

SEQ ID NO: 12885 - DNA, 23 bp, Artificial Sequence
  Synthetic
ccgttttttttttttgctcctac

SEQ ID NO: 12886 - DNA, 23 bp, Artificial Sequence
  Synthetic
ccgttttttttttttagcgttat

SEQ ID NO: 12887 - DNA, 23 bp, Artificial Sequence
  Synthetic
ccgttttttttttttcaacactc

SEQ ID NO: 12888 - DNA, 23 bp, Artificial Sequence
  Synthetic
ccgttttttttttttcgtgccaa

SEQ ID NO: 12889 - DNA, 23 bp, Artificial Sequence
  Synthetic
ccgttttttttttttataagagc

SEQ ID NO: 12890 - DNA, 23 bp, Artificial Sequence
  Synthetic
ccgttttttttttttacctgcgg

SEQ ID NO: 12891 - DNA, 23 bp, Artificial Sequence
  Synthetic
ccgttttttttttttgttagtgt

SEQ ID NO: 12892 - DNA, 23 bp, Artificial Sequence
  Synthetic
ccgttttttttttttacagttgc

SEQ ID NO: 12893 - DNA, 23 bp, Artificial Sequence
  Synthetic
ccgttttttttttttaccagatt

SEQ ID NO: 12894 - DNA, 23 bp, Artificial Sequence
  Synthetic
ccgttttttttttttccaaaact

SEQ ID NO: 12895 - DNA, 23 bp, Artificial Sequence
  Synthetic
ccgttttttttttttaaccagct

SEQ ID NO: 12896 - DNA, 23 bp, Artificial Sequence
  Synthetic
ccgttttttttttttgcaagttt

SEQ ID NO: 12897 - DNA, 23 bp, Artificial Sequence
  Synthetic
ccgttttttttttttataccaac

SEQ ID NO: 12898 - DNA, 23 bp, Artificial Sequence
  Synthetic
ccgttttttttttttggagcagc

SEQ ID NO: 12899 - DNA, 23 bp, Artificial Sequence
  Synthetic
ccgttttttttttttatagctca

SEQ ID NO: 12900 - DNA, 23 bp, Artificial Sequence
  Synthetic
ccgttttttttttttgatttgtt

SEQ ID NO: 12901 - DNA, 23 bp, Artificial Sequence
  Synthetic
ccgttttttttttttcgtcaatg

SEQ ID NO: 12902 - DNA, 23 bp, Artificial Sequence
  Synthetic
ccgttttttttttttcacgacta

SEQ ID NO: 12903 - DNA, 23 bp, Artificial Sequence
  Synthetic
ccgttttttttttttgcgaattt

SEQ ID NO: 12904 - DNA, 23 bp, Artificial Sequence
  Synthetic
ccgttttttttttttgaacggga

SEQ ID NO: 12905 - DNA, 23 bp, Artificial Sequence
  Synthetic
ccgttttttttttttaccaggtt

SEQ ID NO: 12906 - DNA, 23 bp, Artificial Sequence
  Synthetic
ccgttttttttttttaaccgttt

SEQ ID NO: 12907 - DNA, 23 bp, Artificial Sequence
  Synthetic
ccgttttttttttttagctgatt

SEQ ID NO: 12908 - DNA, 23 bp, Artificial Sequence
  Synthetic
ccgttttttttttttggagtttt

SEQ ID NO: 12909 - DNA, 23 bp, Artificial Sequence
  Synthetic
ccgttttttttttttgtagatgt

SEQ ID NO: 12910 - DNA, 23 bp, Artificial Sequence
  Synthetic
ccgttttttttttttcgacagca

SEQ ID NO: 12911 - DNA, 23 bp, Artificial Sequence
  Synthetic
ccgttttttttttttgctgaatg

SEQ ID NO: 12912 - DNA, 23 bp, Artificial Sequence
  Synthetic
ccgttttttttttttgctgaatg

SEQ ID NO: 12913 - DNA, 23 bp, Artificial Sequence
  Synthetic
ccgttttttttttttaagagagc

SEQ ID NO: 12914 - DNA, 23 bp, Artificial Sequence
  Synthetic
ccgttttttttttttaagagagc

SEQ ID NO: 12915 - DNA, 23 bp, Artificial Sequence
  Synthetic
ccgttttttttttttgcatctac

SEQ ID NO: 12916 - DNA, 23 bp, Artificial Sequence
  Synthetic
ccgttttttttttttgcagcttc

SEQ ID NO: 12917 - DNA, 23 bp, Artificial Sequence
  Synthetic
ccgttttttttttttacccaaga

SEQ ID NO: 12918 - DNA, 23 bp, Artificial Sequence
  Synthetic
ccgttttttttttttacatggca

SEQ ID NO: 12919 - DNA, 23 bp, Artificial Sequence
  Synthetic
ccgttttttttttttgcacggaa

SEQ ID NO: 12920 - DNA, 23 bp, Artificial Sequence
  Synthetic
ccgttttttttttttcggcagaa

SEQ ID NO: 12921 - DNA, 23 bp, Artificial Sequence
  Synthetic
ccgttttttttttttcacacagc

SEQ ID NO: 12922 - DNA, 23 bp, Artificial Sequence
  Synthetic
ccgttttttttttttgccgtact

SEQ ID NO: 12923 - DNA, 23 bp, Artificial Sequence
  Synthetic
ccgttttttttttttgactagaa

SEQ ID NO: 12924 - DNA, 23 bp, Artificial Sequence
  Synthetic
ccgttttttttttttagcagagt

SEQ ID NO: 12925 - DNA, 23 bp, Artificial Sequence
  Synthetic
ccgttttttttttttgtaagcta

SEQ ID NO: 12926 - DNA, 23 bp, Artificial Sequence
  Synthetic
ccgttttttttttttcgtacacg

SEQ ID NO: 12927 - DNA, 23 bp, Artificial Sequence
  Synthetic
ccgttttttttttttactctttc

SEQ ID NO: 12928 - DNA, 23 bp, Artificial Sequence
  Synthetic
ccgttttttttttttgggaacac

SEQ ID NO: 12929 - DNA, 23 bp, Artificial Sequence
  Synthetic
ccgttttttttttttactaccca

SEQ ID NO: 12930 - DNA, 23 bp, Artificial Sequence
  Synthetic
ccgttttttttttttctatgcca

SEQ ID NO: 12931 - DNA, 23 bp, Artificial Sequence
  Synthetic
ccgttttttttttttctgaactg

SEQ ID NO: 12932 - DNA, 23 bp, Artificial Sequence
  Synthetic
ccgttttttttttttagactgcc

SEQ ID NO: 12933 - DNA, 23 bp, Artificial Sequence
  Synthetic
ccgttttttttttttaaggcggt

SEQ ID NO: 12934 - DNA, 23 bp, Artificial Sequence
  Synthetic
ccgttttttttttttgacagcta

SEQ ID NO: 12935 - DNA, 23 bp, Artificial Sequence
  Synthetic
ccgttttttttttttgctttggt

SEQ ID NO: 12936 - DNA, 23 bp, Artificial Sequence
  Synthetic
ccgttttttttttttggctttca

SEQ ID NO: 12937 - DNA, 23 bp, Artificial Sequence
  Synthetic
ccgttttttttttttctagcttt

SEQ ID NO: 12938 - DNA, 23 bp, Artificial Sequence
  Synthetic
ccgttttttttttttctggcttt

SEQ ID NO: 12939 - DNA, 23 bp, Artificial Sequence
  Synthetic
ccgttttttttttttcactgaat

SEQ ID NO: 12940 - DNA, 23 bp, Artificial Sequence
  Synthetic
ccgttttttttttttacagcatt

SEQ ID NO: 12941 - DNA, 23 bp, Artificial Sequence
  Synthetic
ccgttttttttttttcacgcctt

SEQ ID NO: 12942 - DNA, 23 bp, Artificial Sequence
  Synthetic
ccgttttttttttttactgtggc

SEQ ID NO: 12943 - DNA, 23 bp, Artificial Sequence
  Synthetic
ccgttttttttttttcacctgaa

SEQ ID NO: 12944 - DNA, 23 bp, Artificial Sequence
  Synthetic
ccgttttttttttttgggcattc

SEQ ID NO: 12945 - DNA, 23 bp, Artificial Sequence
  Synthetic
ccgttttttttttttactataca

SEQ ID NO: 12946 - DNA, 23 bp, Artificial Sequence
  Synthetic
ccgttttttttttttacacttga

SEQ ID NO: 12947 - DNA, 23 bp, Artificial Sequence
  Synthetic
ccgttttttttttttgaaatgcg

SEQ ID NO: 12948 - DNA, 23 bp, Artificial Sequence
  Synthetic
ccgttttttttttttcatacttc

SEQ ID NO: 12949 - DNA, 23 bp, Artificial Sequence
  Synthetic
ccgttttttttttttgcattcac

SEQ ID NO: 12950 - DNA, 23 bp, Artificial Sequence
  Synthetic
ccgttttttttttttcacatcaa

SEQ ID NO: 12951 - DNA, 23 bp, Artificial Sequence
  Synthetic
ccgttttttttttttcagaatca

SEQ ID NO: 12952 - DNA, 23 bp, Artificial Sequence
  Synthetic
ccgttttttttttttcgtgaatt

SEQ ID NO: 12953 - DNA, 23 bp, Artificial Sequence
  Synthetic
ccgttttttttttttcgatggaa

SEQ ID NO: 12954 - DNA, 23 bp, Artificial Sequence
  Synthetic
ccgttttttttttttcctggtcg

SEQ ID NO: 12955 - DNA, 23 bp, Artificial Sequence
  Synthetic
ccgttttttttttttgcctgttg

SEQ ID NO: 12956 - DNA, 23 bp, Artificial Sequence
  Synthetic
ccgttttttttttttaccgcagt

SEQ ID NO: 12957 - DNA, 23 bp, Artificial Sequence
  Synthetic
ccgttttttttttttccgcacat

SEQ ID NO: 12958 - DNA, 23 bp, Artificial Sequence
  Synthetic
ccgttttttttttttagggtatt

SEQ ID NO: 12959 - DNA, 23 bp, Artificial Sequence
  Synthetic
ccgttttttttttttaggccggg

SEQ ID NO: 12960 - DNA, 23 bp, Artificial Sequence
  Synthetic
ccgttttttttttttgcgtcatt

SEQ ID NO: 12961 - DNA, 23 bp, Artificial Sequence
  Synthetic
ccgttttttttttttagctgttc

SEQ ID NO: 12962 - DNA, 23 bp, Artificial Sequence
  Synthetic
ccgttttttttttttgaatggca

SEQ ID NO: 12963 - DNA, 23 bp, Artificial Sequence
  Synthetic
ccgttttttttttttcagtacct

SEQ ID NO: 12964 - DNA, 23 bp, Artificial Sequence
  Synthetic
ccgttttttttttttagtacttt

SEQ ID NO: 12965 - DNA, 23 bp, Artificial Sequence
  Synthetic
ccgttttttttttttgcgaagat

SEQ ID NO: 12966 - DNA, 23 bp, Artificial Sequence
  Synthetic
ccgttttttttttttatttctcg

SEQ ID NO: 12967 - DNA, 23 bp, Artificial Sequence
  Synthetic
ccgttttttttttttgaagcaaa

SEQ ID NO: 12968 - DNA, 23 bp, Artificial Sequence
  Synthetic
ccgttttttttttttatatcccg

SEQ ID NO: 12969 - DNA, 23 bp, Artificial Sequence
  Synthetic
ccgttttttttttttataccact

SEQ ID NO: 12970 - DNA, 23 bp, Artificial Sequence
  Synthetic
ccgttttttttttttagctactt

SEQ ID NO: 12971 - DNA, 23 bp, Artificial Sequence
  Synthetic
ccgttttttttttttgctcctac

SEQ ID NO: 12972 - DNA, 23 bp, Artificial Sequence
  Synthetic
ccgttttttttttttagaagaga

SEQ ID NO: 12973 - DNA, 23 bp, Artificial Sequence
  Synthetic
ccgttttttttttttagcgttat

SEQ ID NO: 12974 - DNA, 23 bp, Artificial Sequence
  Synthetic
ccgttttttttttttcaacgctc

SEQ ID NO: 12975 - DNA, 23 bp, Artificial Sequence
  Synthetic
ccgttttttttttttcatgccaa

SEQ ID NO: 12976 - DNA, 23 bp, Artificial Sequence
  Synthetic
ccgttttttttttttataagagc

SEQ ID NO: 12977 - DNA, 23 bp, Artificial Sequence
  Synthetic
ccgttttttttttttacctgcgg

SEQ ID NO: 12978 - DNA, 23 bp, Artificial Sequence
  Synthetic
ccgttttttttttttgtcagtgt

SEQ ID NO: 12979 - DNA, 23 bp, Artificial Sequence
  Synthetic
ccgttttttttttttctacagtc

SEQ ID NO: 12980 - DNA, 23 bp, Artificial Sequence
  Synthetic
ccgttttttttttttcagtcttc

SEQ ID NO: 12981 - DNA, 23 bp, Artificial Sequence
  Synthetic
ccgttttttttttttactgggta

SEQ ID NO: 12982 - DNA, 23 bp, Artificial Sequence
  Synthetic
ccgttttttttttttaaaggatt

SEQ ID NO: 12983 - DNA, 23 bp, Artificial Sequence
  Synthetic
ccgttttttttttttccagatta

SEQ ID NO: 12984 - DNA, 23 bp, Artificial Sequence
  Synthetic
ccgttttttttttttacaagagt

SEQ ID NO: 12985 - DNA, 23 bp, Artificial Sequence
  Synthetic
ccgttttttttttttgtgaaaac

SEQ ID NO: 12986 - DNA, 23 bp, Artificial Sequence
  Synthetic
ccgttttttttttttcagaaaac

SEQ ID NO: 12987 - DNA, 23 bp, Artificial Sequence
  Synthetic
ccgttttttttttttataacaac

SEQ ID NO: 12988 - DNA, 23 bp, Artificial Sequence
  Synthetic
ccgttttttttttttaccaccct

SEQ ID NO: 12989 - DNA, 23 bp, Artificial Sequence
  Synthetic
ccgttttttttttttctttgcca

SEQ ID NO: 12990 - DNA, 23 bp, Artificial Sequence
  Synthetic
ccgttttttttttttcagcagac

SEQ ID NO: 12991 - DNA, 23 bp, Artificial Sequence
  Synthetic
ccgttttttttttttccaaactg

SEQ ID NO: 12992 - DNA, 23 bp, Artificial Sequence
  Synthetic
ccgttttttttttttgttttgcc

SEQ ID NO: 12993 - DNA, 23 bp, Artificial Sequence
  Synthetic
ccgttttttttttttccactgct

SEQ ID NO: 12994 - DNA, 23 bp, Artificial Sequence
  Synthetic
ccgttttttttttttatgctttc

SEQ ID NO: 12995 - DNA, 23 bp, Artificial Sequence
  Synthetic
ccgttttttttttttaaacaccc

SEQ ID NO: 12996 - DNA, 23 bp, Artificial Sequence
  Synthetic
ccgttttttttttttagccgaca

SEQ ID NO: 12997 - DNA, 23 bp, Artificial Sequence
  Synthetic
ccgttttttttttttaaccagct

SEQ ID NO: 12998 - DNA, 23 bp, Artificial Sequence
  Synthetic
ccgttttttttttttctgctagt

SEQ ID NO: 12999 - DNA, 23 bp, Artificial Sequence
  Synthetic
ccgttttttttttttataccaac

SEQ ID NO: 13000 - DNA, 23 bp, Artificial Sequence
  Synthetic
ccgttttttttttttggagcagc

SEQ ID NO: 13001 - DNA, 23 bp, Artificial Sequence
  Synthetic
ccgttttttttttttatagctca

SEQ ID NO: 13002 - DNA, 23 bp, Artificial Sequence
  Synthetic
ccgttttttttttttatttgttc

SEQ ID NO: 13003 - DNA, 23 bp, Artificial Sequence
  Synthetic
ccgttttttttttttctgcaacg

SEQ ID NO: 13004 - DNA, 23 bp, Artificial Sequence
  Synthetic
ccgttttttttttttcttgacag

SEQ ID NO: 13005 - DNA, 23 bp, Artificial Sequence
  Synthetic
ccgttttttttttttgtcagaga

SEQ ID NO: 13006 - DNA, 23 bp, Artificial Sequence
  Synthetic
ccgttttttttttttatgcgaat

SEQ ID NO: 13007 - DNA, 23 bp, Artificial Sequence
  Synthetic
ccgttttttttttttgaacggga

SEQ ID NO: 13008 - DNA, 23 bp, Artificial Sequence
  Synthetic
ccgttttttttttttctgcaagt

SEQ ID NO: 13009 - DNA, 23 bp, Artificial Sequence
  Synthetic
ccgttttttttttttctccagtt

SEQ ID NO: 13010 - DNA, 23 bp, Artificial Sequence
  Synthetic
ccgttttttttttttaagctgat

SEQ ID NO: 13011 - DNA, 23 bp, Artificial Sequence
  Synthetic
ccgttttttttttttatcacacg

SEQ ID NO: 13012 - DNA, 23 bp, Artificial Sequence
  Synthetic
ccgttttttttttttgctgatgt

SEQ ID NO: 13013 - DNA, 23 bp, Artificial Sequence
  Synthetic
ccgttttttttttttggtgattt

SEQ ID NO: 13014 - DNA, 23 bp, Artificial Sequence
  Synthetic
ccgttttttttttttgtagatgt

SEQ ID NO: 13015 - DNA, 23 bp, Artificial Sequence
  Synthetic
ccgttttttttttttcgacagca

SEQ ID NO: 13016 - DNA, 23 bp, Artificial Sequence
  Synthetic
ccgttttttttttttgctgaatg

SEQ ID NO: 13017 - DNA, 23 bp, Artificial Sequence
  Synthetic
ccgttttttttttttgctgaatg

SEQ ID NO: 13018 - DNA, 23 bp, Artificial Sequence
  Synthetic
ccgttttttttttttaagagagc

SEQ ID NO: 13019 - DNA, 23 bp, Artificial Sequence
  Synthetic
ccgttttttttttttaagagagc

SEQ ID NO: 13020 - DNA, 23 bp, Artificial Sequence
  Synthetic
ccgttttttttttttgcatctac

SEQ ID NO: 13021 - DNA, 23 bp, Artificial Sequence
  Synthetic
ccgttttttttttttgcagcttc

SEQ ID NO: 13022 - DNA, 23 bp, Artificial Sequence
  Synthetic
ccgttttttttttttacccaaga

SEQ ID NO: 13023 - DNA, 23 bp, Artificial Sequence
  Synthetic
ccgttttttttttttacatggat

SEQ ID NO: 13024 - DNA, 23 bp, Artificial Sequence
  Synthetic
ccgttttttttttttgcacggaa

SEQ ID NO: 13025 - DNA, 23 bp, Artificial Sequence
  Synthetic
ccgttttttttttttgcacggaa

SEQ ID NO: 13026 - DNA, 23 bp, Artificial Sequence
  Synthetic
ccgttttttttttttcggattat

SEQ ID NO: 13027 - DNA, 23 bp, Artificial Sequence
  Synthetic
ccgttttttttttttcagcagaa

SEQ ID NO: 13028 - DNA, 23 bp, Artificial Sequence
  Synthetic
ccgttttttttttttcagcggaa

SEQ ID NO: 13029 - DNA, 23 bp, Artificial Sequence
  Synthetic
ccgttttttttttttcaacccaa

SEQ ID NO: 13030 - DNA, 23 bp, Artificial Sequence
  Synthetic
ccgttttttttttttcacacagc

SEQ ID NO: 13031 - DNA, 23 bp, Artificial Sequence
  Synthetic
ccgttttttttttttgccgtact

SEQ ID NO: 13032 - DNA, 23 bp, Artificial Sequence
  Synthetic
ccgttttttttttttatcatcct

SEQ ID NO: 13033 - DNA, 23 bp, Artificial Sequence
  Synthetic
ccgttttttttttttaactagaa

SEQ ID NO: 13034 - DNA, 23 bp, Artificial Sequence
  Synthetic
ccgttttttttttttagatgagt

SEQ ID NO: 13035 - DNA, 23 bp, Artificial Sequence
  Synthetic
ccgttttttttttttgtaagcta

SEQ ID NO: 13036 - DNA, 23 bp, Artificial Sequence
  Synthetic
ccgttttttttttttcaactcgc

SEQ ID NO: 13037 - DNA, 23 bp, Artificial Sequence
  Synthetic
ccgttttttttttttggtaacgc

SEQ ID NO: 13038 - DNA, 23 bp, Artificial Sequence
  Synthetic
ccgttttttttttttggttacgc

SEQ ID NO: 13039 - DNA, 23 bp, Artificial Sequence
  Synthetic
ccgttttttttttttacatccct

SEQ ID NO: 13040 - DNA, 23 bp, Artificial Sequence
  Synthetic
ccgttttttttttttactctttc

SEQ ID NO: 13041 - DNA, 23 bp, Artificial Sequence
  Synthetic
ccgttttttttttttggaaacac

SEQ ID NO: 13042 - DNA, 23 bp, Artificial Sequence
  Synthetic
ccgttttttttttttactaccca

SEQ ID NO: 13043 - DNA, 23 bp, Artificial Sequence
  Synthetic
ccgttttttttttttctatgcca

SEQ ID NO: 13044 - DNA, 23 bp, Artificial Sequence
  Synthetic
ccgttttttttttttctgaactg

SEQ ID NO: 13045 - DNA, 23 bp, Artificial Sequence
  Synthetic
ccgttttttttttttagactgcc

SEQ ID NO: 13046 - DNA, 23 bp, Artificial Sequence
  Synthetic
ccgttttttttttttaagccggt

SEQ ID NO: 13047 - DNA, 23 bp, Artificial Sequence
  Synthetic
ccgttttttttttttaaggcttc

SEQ ID NO: 13048 - DNA, 23 bp, Artificial Sequence
  Synthetic
ccgttttttttttttgacagcta

SEQ ID NO: 13049 - DNA, 23 bp, Artificial Sequence
  Synthetic
ccgttttttttttttcacaaaca

SEQ ID NO: 13050 - DNA, 23 bp, Artificial Sequence
  Synthetic
ccgttttttttttttgctttggt

SEQ ID NO: 13051 - DNA, 23 bp, Artificial Sequence
  Synthetic
ccgttttttttttttggctttca

SEQ ID NO: 13052 - DNA, 23 bp, Artificial Sequence
  Synthetic
ccgttttttttttttctagcttt

SEQ ID NO: 13053 - DNA, 23 bp, Artificial Sequence
  Synthetic
ccgttttttttttttctggcttt

SEQ ID NO: 13054 - DNA, 23 bp, Artificial Sequence
  Synthetic
ccgttttttttttttctgaattt

SEQ ID NO: 13055 - DNA, 23 bp, Artificial Sequence
  Synthetic
ccgttttttttttttcaatatta

SEQ ID NO: 13056 - DNA, 23 bp, Artificial Sequence
  Synthetic
ccgttttttttttttcacgactt

SEQ ID NO: 13057 - DNA, 23 bp, Artificial Sequence
  Synthetic
ccgttttttttttttactgtggc

SEQ ID NO: 13058 - DNA, 23 bp, Artificial Sequence
  Synthetic
ccgttttttttttttcacctgaa

SEQ ID NO: 13059 - DNA, 23 bp, Artificial Sequence
  Synthetic
ccgttttttttttttgggcattc

SEQ ID NO: 13060 - DNA, 23 bp, Artificial Sequence
  Synthetic
ccgttttttttttttaaggattt

SEQ ID NO: 13061 - DNA, 23 bp, Artificial Sequence
  Synthetic
ccgttttttttttttcggcatta

SEQ ID NO: 13062 - DNA, 23 bp, Artificial Sequence
  Synthetic
ccgttttttttttttgggacatc

SEQ ID NO: 13063 - DNA, 23 bp, Artificial Sequence
  Synthetic
ccgttttttttttttccagctaa

SEQ ID NO: 13064 - DNA, 23 bp, Artificial Sequence
  Synthetic
ccgttttttttttttaggaacac

SEQ ID NO: 13065 - DNA, 23 bp, Artificial Sequence
  Synthetic
ccgttttttttttttatcagctt

SEQ ID NO: 13066 - DNA, 23 bp, Artificial Sequence
  Synthetic
ccgttttttttttttctatacaa

SEQ ID NO: 13067 - DNA, 23 bp, Artificial Sequence
  Synthetic
ccgttttttttttttccatactt

SEQ ID NO: 13068 - DNA, 23 bp, Artificial Sequence
  Synthetic
ccgttttttttttttcaaattcg

SEQ ID NO: 13069 - DNA, 23 bp, Artificial Sequence
  Synthetic
ccgttttttttttttacaagttc

SEQ ID NO: 13070 - DNA, 23 bp, Artificial Sequence
  Synthetic
ccgttttttttttttcaagaact

SEQ ID NO: 13071 - DNA, 23 bp, Artificial Sequence
  Synthetic
ccgttttttttttttccagtacc

SEQ ID NO: 13072 - DNA, 23 bp, Artificial Sequence
  Synthetic
ccgttttttttttttggcattca

SEQ ID NO: 13073 - DNA, 23 bp, Artificial Sequence
  Synthetic
ccgttttttttttttacaagtta

SEQ ID NO: 13074 - DNA, 23 bp, Artificial Sequence
  Synthetic
ccgttttttttttttcagctggt

SEQ ID NO: 13075 - DNA, 23 bp, Artificial Sequence
  Synthetic
ccgttttttttttttctcatcaa

SEQ ID NO: 13076 - DNA, 23 bp, Artificial Sequence
  Synthetic
ccgttttttttttttctcgtcaa

SEQ ID NO: 13077 - DNA, 23 bp, Artificial Sequence
  Synthetic
ccgttttttttttttggagagag

SEQ ID NO: 13078 - DNA, 23 bp, Artificial Sequence
  Synthetic
ccgttttttttttttcccttatc

SEQ ID NO: 13079 - DNA, 23 bp, Artificial Sequence
  Synthetic
ccgttttttttttttggggcgag

SEQ ID NO: 13080 - DNA, 23 bp, Artificial Sequence
  Synthetic
ccgttttttttttttgccgctgt

SEQ ID NO: 13081 - DNA, 23 bp, Artificial Sequence
  Synthetic
ccgttttttttttttaagaattg

SEQ ID NO: 13082 - DNA, 23 bp, Artificial Sequence
  Synthetic
ccgttttttttttttgaattctt

SEQ ID NO: 13083 - DNA, 23 bp, Artificial Sequence
  Synthetic
ccgttttttttttttgaattctc

SEQ ID NO: 13084 - DNA, 23 bp, Artificial Sequence
  Synthetic
ccgttttttttttttacccgtta

SEQ ID NO: 13085 - DNA, 23 bp, Artificial Sequence
  Synthetic
ccgttttttttttttgcgcgcta

SEQ ID NO: 13086 - DNA, 23 bp, Artificial Sequence
  Synthetic
ccgttttttttttttgtaggaac

SEQ ID NO: 13087 - DNA, 23 bp, Artificial Sequence
  Synthetic
ccgttttttttttttgagcacgg

SEQ ID NO: 13088 - DNA, 23 bp, Artificial Sequence
  Synthetic
ccgttttttttttttgagcacgg

SEQ ID NO: 13089 - DNA, 23 bp, Artificial Sequence
  Synthetic
ccgttttttttttttcgtaccag

SEQ ID NO: 13090 - DNA, 23 bp, Artificial Sequence
  Synthetic
ccgttttttttttttaacggacg

SEQ ID NO: 13091 - DNA, 23 bp, Artificial Sequence
  Synthetic
ccgttttttttttttatgagtgt

SEQ ID NO: 13092 - DNA, 23 bp, Artificial Sequence
  Synthetic
ccgttttttttttttcatttcat

SEQ ID NO: 13093 - DNA, 23 bp, Artificial Sequence
  Synthetic
ccgttttttttttttcaaagaga

SEQ ID NO: 13094 - DNA, 23 bp, Artificial Sequence
  Synthetic
ccgttttttttttttctgtcgac

SEQ ID NO: 13095 - DNA, 23 bp, Artificial Sequence
  Synthetic
ccgttttttttttttctgtcgac

SEQ ID NO: 13096 - DNA, 23 bp, Artificial Sequence
  Synthetic
ccgttttttttttttcagacaaa

SEQ ID NO: 13097 - DNA, 23 bp, Artificial Sequence
  Synthetic
ccgttttttttttttgaattacc

SEQ ID NO: 13098 - DNA, 23 bp, Artificial Sequence
  Synthetic
ccgttttttttttttaattgctg

SEQ ID NO: 13099 - DNA, 23 bp, Artificial Sequence
  Synthetic
ccgttttttttttttcactgatt

SEQ ID NO: 13100 - DNA, 23 bp, Artificial Sequence
  Synthetic
ccgttttttttttttgcacgagt

SEQ ID NO: 13101 - DNA, 23 bp, Artificial Sequence
  Synthetic
ccgttttttttttttgcaaacga

SEQ ID NO: 13102 - DNA, 23 bp, Artificial Sequence
  Synthetic
ccgttttttttttttatgaaatg

SEQ ID NO: 13103 - DNA, 23 bp, Artificial Sequence
  Synthetic
ccgttttttttttttgtcgcagg

SEQ ID NO: 13104 - DNA, 23 bp, Artificial Sequence
  Synthetic
ccgttttttttttttctcatcaa

SEQ ID NO: 13105 - DNA, 23 bp, Artificial Sequence
  Synthetic
ccgttttttttttttctcctcaa

SEQ ID NO: 13106 - DNA, 23 bp, Artificial Sequence
  Synthetic
ccgttttttttttttcccatcaa

SEQ ID NO: 13107 - DNA, 23 bp, Artificial Sequence
  Synthetic
ccgttttttttttttagacacac

SEQ ID NO: 13108 - DNA, 23 bp, Artificial Sequence
  Synthetic
ccgttttttttttttccagtttc

SEQ ID NO: 13109 - DNA, 23 bp, Artificial Sequence
  Synthetic
ccgttttttttttttcacattta

SEQ ID NO: 13110 - DNA, 23 bp, Artificial Sequence
  Synthetic
ccgttttttttttttagagcacc

SEQ ID NO: 13111 - DNA, 23 bp, Artificial Sequence
  Synthetic
ccgttttttttttttagagtcac

SEQ ID NO: 13112 - DNA, 23 bp, Artificial Sequence
  Synthetic
ccgttttttttttttcacaggca

SEQ ID NO: 13113 - DNA, 23 bp, Artificial Sequence
  Synthetic
ccgttttttttttttcactcaag

SEQ ID NO: 13114 - DNA, 23 bp, Artificial Sequence
  Synthetic
ccgttttttttttttcacagtat

SEQ ID NO: 13115 - DNA, 23 bp, Artificial Sequence
  Synthetic
ccgttttttttttttggacaaac

SEQ ID NO: 13116 - DNA, 23 bp, Artificial Sequence
  Synthetic
ccgttttttttttttaaggccgg

SEQ ID NO: 13117 - DNA, 23 bp, Artificial Sequence
  Synthetic
ccgttttttttttttaggccggt

SEQ ID NO: 13118 - DNA, 23 bp, Artificial Sequence
  Synthetic
ccgttttttttttttaggccgtc

SEQ ID NO: 13119 - DNA, 23 bp, Artificial Sequence
  Synthetic
ccgttttttttttttgggctgtg

SEQ ID NO: 13120 - DNA, 23 bp, Artificial Sequence
  Synthetic
ccgttttttttttttcgaactta

SEQ ID NO: 13121 - DNA, 23 bp, Artificial Sequence
  Synthetic
ccgttttttttttttctttctga

SEQ ID NO: 13122 - DNA, 23 bp, Artificial Sequence
  Synthetic
ccgttttttttttttgccagtaa

SEQ ID NO: 13123 - DNA, 23 bp, Artificial Sequence
  Synthetic
ccgttttttttttttctggatac

SEQ ID NO: 13124 - DNA, 23 bp, Artificial Sequence
  Synthetic
ccgttttttttttttagataaac

SEQ ID NO: 13125 - DNA, 23 bp, Artificial Sequence
  Synthetic
ccgttttttttttttagctatgc

SEQ ID NO: 13126 - DNA, 23 bp, Artificial Sequence
  Synthetic
ccgttttttttttttagctattc

SEQ ID NO: 13127 - DNA, 23 bp, Artificial Sequence
  Synthetic
ccgttttttttttttaatgcgac

SEQ ID NO: 13128 - DNA, 23 bp, Artificial Sequence
  Synthetic
ccgttttttttttttaaccagct

SEQ ID NO: 13129 - DNA, 23 bp, Artificial Sequence
  Synthetic
ccgttttttttttttaatggttg

SEQ ID NO: 13130 - DNA, 23 bp, Artificial Sequence
  Synthetic
ccgttttttttttttatatcaca

SEQ ID NO: 13131 - DNA, 23 bp, Artificial Sequence
  Synthetic
ccgttttttttttttaaaagaac

SEQ ID NO: 13132 - DNA, 23 bp, Artificial Sequence
  Synthetic
ccgttttttttttttcaacaaaa

SEQ ID NO: 13133 - DNA, 23 bp, Artificial Sequence
  Synthetic
ccgttttttttttttgctttggt

SEQ ID NO: 13134 - DNA, 23 bp, Artificial Sequence
  Synthetic
ccgttttttttttttacatcttt

SEQ ID NO: 13135 - DNA, 23 bp, Artificial Sequence
  Synthetic
ccgttttttttttttacacctga

SEQ ID NO: 13136 - DNA, 23 bp, Artificial Sequence
  Synthetic
ccgttttttttttttaggccggg

SEQ ID NO: 13137 - DNA, 23 bp, Artificial Sequence
  Synthetic
ccgttttttttttttcaggccgg

SEQ ID NO: 13138 - DNA, 23 bp, Artificial Sequence
  Synthetic
ccgttttttttttttatacagct

SEQ ID NO: 13139 - DNA, 23 bp, Artificial Sequence
  Synthetic
ccgttttttttttttatacagct

SEQ ID NO: 13140 - DNA, 23 bp, Artificial Sequence
  Synthetic
ccgttttttttttttacagctag

SEQ ID NO: 13141 - DNA, 23 bp, Artificial Sequence
  Synthetic
ccgttttttttttttacgtatac

SEQ ID NO: 13142 - DNA, 23 bp, Artificial Sequence
  Synthetic
ccgttttttttttttaggataca

SEQ ID NO: 13143 - DNA, 23 bp, Artificial Sequence
  Synthetic
ccgttttttttttttatcagctt

SEQ ID NO: 13144 - DNA, 23 bp, Artificial Sequence
  Synthetic
ccgttttttttttttctatacaa

SEQ ID NO: 13145 - DNA, 23 bp, Artificial Sequence
  Synthetic
ccgttttttttttttccatactt

SEQ ID NO: 13146 - DNA, 23 bp, Artificial Sequence
  Synthetic
ccgttttttttttttcaaattcg

SEQ ID NO: 13147 - DNA, 23 bp, Artificial Sequence
  Synthetic
ccgttttttttttttacaagttc

SEQ ID NO: 13148 - DNA, 23 bp, Artificial Sequence
  Synthetic
ccgttttttttttttcaagaact

SEQ ID NO: 13149 - DNA, 23 bp, Artificial Sequence
  Synthetic
ccgttttttttttttccagtacc

SEQ ID NO: 13150 - DNA, 23 bp, Artificial Sequence
  Synthetic
ccgttttttttttttggcattca

SEQ ID NO: 13151 - DNA, 23 bp, Artificial Sequence
  Synthetic
ccgttttttttttttacaagtta

SEQ ID NO: 13152 - DNA, 23 bp, Artificial Sequence
  Synthetic
ccgttttttttttttcagctggt

SEQ ID NO: 13153 - DNA, 23 bp, Artificial Sequence
  Synthetic
ccgttttttttttttctcatcaa

SEQ ID NO: 13154 - DNA, 23 bp, Artificial Sequence
  Synthetic
ccgttttttttttttctcgtcaa

SEQ ID NO: 13155 - DNA, 23 bp, Artificial Sequence
  Synthetic
ccgttttttttttttggagagag

SEQ ID NO: 13156 - DNA, 23 bp, Artificial Sequence
  Synthetic
ccgttttttttttttcccttatc

SEQ ID NO: 13157 - DNA, 23 bp, Artificial Sequence
  Synthetic
ccgttttttttttttgccgctgt

SEQ ID NO: 13158 - DNA, 23 bp, Artificial Sequence
  Synthetic
ccgttttttttttttaagaattg

SEQ ID NO: 13159 - DNA, 23 bp, Artificial Sequence
  Synthetic
ccgttttttttttttgaattctt

SEQ ID NO: 13160 - DNA, 23 bp, Artificial Sequence
  Synthetic
ccgttttttttttttgaattctc

SEQ ID NO: 13161 - DNA, 23 bp, Artificial Sequence
  Synthetic
ccgttttttttttttacccgtta

SEQ ID NO: 13162 - DNA, 23 bp, Artificial Sequence
  Synthetic
ccgttttttttttttgcgcgcta

SEQ ID NO: 13163 - DNA, 23 bp, Artificial Sequence
  Synthetic
ccgttttttttttttgagcacgg

SEQ ID NO: 13164 - DNA, 23 bp, Artificial Sequence
  Synthetic
ccgttttttttttttgagcacgg

SEQ ID NO: 13165 - DNA, 23 bp, Artificial Sequence
  Synthetic
ccgttttttttttttcgtaccag

SEQ ID NO: 13166 - DNA, 23 bp, Artificial Sequence
  Synthetic
ccgttttttttttttaacggacg

SEQ ID NO: 13167 - DNA, 23 bp, Artificial Sequence
  Synthetic
ccgttttttttttttatgagtgt

SEQ ID NO: 13168 - DNA, 23 bp, Artificial Sequence
  Synthetic
ccgttttttttttttcatttcat

SEQ ID NO: 13169 - DNA, 23 bp, Artificial Sequence
  Synthetic
ccgttttttttttttcaaagaga

SEQ ID NO: 13170 - DNA, 23 bp, Artificial Sequence
  Synthetic
ccgttttttttttttcagacaaa

SEQ ID NO: 13171 - DNA, 23 bp, Artificial Sequence
  Synthetic
ccgttttttttttttgaattacc

SEQ ID NO: 13172 - DNA, 23 bp, Artificial Sequence
  Synthetic
ccgttttttttttttaattgctg

SEQ ID NO: 13173 - DNA, 23 bp, Artificial Sequence
  Synthetic
ccgttttttttttttcactgatt

SEQ ID NO: 13174 - DNA, 23 bp, Artificial Sequence
  Synthetic
ccgttttttttttttgcacgagt

SEQ ID NO: 13175 - DNA, 23 bp, Artificial Sequence
  Synthetic
ccgttttttttttttgcaaacga

SEQ ID NO: 13176 - DNA, 23 bp, Artificial Sequence
  Synthetic
ccgttttttttttttatgaaatg

SEQ ID NO: 13177 - DNA, 23 bp, Artificial Sequence
  Synthetic
ccgttttttttttttgtcgcagg

SEQ ID NO: 13178 - DNA, 23 bp, Artificial Sequence
  Synthetic
ccgttttttttttttctcatcaa

SEQ ID NO: 13179 - DNA, 23 bp, Artificial Sequence
  Synthetic
ccgttttttttttttctcctcaa

SEQ ID NO: 13180 - DNA, 23 bp, Artificial Sequence
  Synthetic
ccgttttttttttttcccatcaa

SEQ ID NO: 13181 - DNA, 23 bp, Artificial Sequence
  Synthetic
ccgttttttttttttagacacac

SEQ ID NO: 13182 - DNA, 23 bp, Artificial Sequence
  Synthetic
ccgttttttttttttcacattta

SEQ ID NO: 13183 - DNA, 23 bp, Artificial Sequence
  Synthetic
ccgttttttttttttagagcacc

SEQ ID NO: 13184 - DNA, 23 bp, Artificial Sequence
  Synthetic
ccgttttttttttttagagtcac

SEQ ID NO: 13185 - DNA, 23 bp, Artificial Sequence
  Synthetic
ccgttttttttttttcactcaag

SEQ ID NO: 13186 - DNA, 23 bp, Artificial Sequence
  Synthetic
ccgttttttttttttcacagtat

SEQ ID NO: 13187 - DNA, 23 bp, Artificial Sequence
  Synthetic
ccgttttttttttttagacaaac

SEQ ID NO: 13188 - DNA, 23 bp, Artificial Sequence
  Synthetic
ccgttttttttttttcgaactta

SEQ ID NO: 13189 - DNA, 23 bp, Artificial Sequence
  Synthetic
ccgttttttttttttctttctga

SEQ ID NO: 13190 - DNA, 23 bp, Artificial Sequence
  Synthetic
ccgttttttttttttgccagtaa

SEQ ID NO: 13191 - DNA, 23 bp, Artificial Sequence
  Synthetic
ccgttttttttttttggatacca

SEQ ID NO: 13192 - DNA, 23 bp, Artificial Sequence
  Synthetic
ccgttttttttttttagataaac

SEQ ID NO: 13193 - DNA, 23 bp, Artificial Sequence
  Synthetic
ccgttttttttttttagctatgc

SEQ ID NO: 13194 - DNA, 23 bp, Artificial Sequence
  Synthetic
ccgttttttttttttagctattc

SEQ ID NO: 13195 - DNA, 23 bp, Artificial Sequence
  Synthetic
ccgttttttttttttaatgcgac

SEQ ID NO: 13196 - DNA, 23 bp, Artificial Sequence
  Synthetic
ccgttttttttttttaaccagct

SEQ ID NO: 13197 - DNA, 23 bp, Artificial Sequence
  Synthetic
ccgttttttttttttaatggttg

SEQ ID NO: 13198 - DNA, 23 bp, Artificial Sequence
  Synthetic
ccgttttttttttttatatcaca

SEQ ID NO: 13199 - DNA, 23 bp, Artificial Sequence
  Synthetic
ccgttttttttttttaaaagaac

SEQ ID NO: 13200 - DNA, 23 bp, Artificial Sequence
  Synthetic
ccgttttttttttttcaacaaaa

SEQ ID NO: 13201 - DNA, 23 bp, Artificial Sequence
  Synthetic
ccgttttttttttttgctttggt

SEQ ID NO: 13202 - DNA, 23 bp, Artificial Sequence
  Synthetic
ccgttttttttttttacatcttt

SEQ ID NO: 13203 - DNA, 23 bp, Artificial Sequence
  Synthetic
ccgttttttttttttacacctga

SEQ ID NO: 13204 - DNA, 23 bp, Artificial Sequence
  Synthetic
ccgttttttttttttaggccggg

SEQ ID NO: 13205 - DNA, 23 bp, Artificial Sequence
  Synthetic
ccgttttttttttttcaggccgg

SEQ ID NO: 13206 - DNA, 23 bp, Artificial Sequence
  Synthetic
ccgttttttttttttatacagct

SEQ ID NO: 13207 - DNA, 23 bp, Artificial Sequence
  Synthetic
ccgttttttttttttatacagct

SEQ ID NO: 13208 - DNA, 23 bp, Artificial Sequence
  Synthetic
ccgttttttttttttacagctag

SEQ ID NO: 13209 - DNA, 23 bp, Artificial Sequence
  Synthetic
ccgttttttttttttacgtatac

SEQ ID NO: 13210 - DNA, 23 bp, Artificial Sequence
  Synthetic
ccgttttttttttttaggataca

SEQ ID NO: 13211 - DNA, 23 bp, Artificial Sequence
  Synthetic
ccgttttttttttttactataca

SEQ ID NO: 13212 - DNA, 23 bp, Artificial Sequence
  Synthetic
ccgttttttttttttaccacaca

SEQ ID NO: 13213 - DNA, 23 bp, Artificial Sequence
  Synthetic
ccgttttttttttttaccataca

SEQ ID NO: 13214 - DNA, 23 bp, Artificial Sequence
  Synthetic
ccgttttttttttttaccataca

SEQ ID NO: 13215 - DNA, 23 bp, Artificial Sequence
  Synthetic
ccgttttttttttttactattca

SEQ ID NO: 13216 - DNA, 23 bp, Artificial Sequence
  Synthetic
ccgttttttttttttactataca

SEQ ID NO: 13217 - DNA, 23 bp, Artificial Sequence
  Synthetic
ccgttttttttttttactataca

SEQ ID NO: 13218 - DNA, 23 bp, Artificial Sequence
  Synthetic
ccgttttttttttttacaacaca

SEQ ID NO: 13219 - DNA, 23 bp, Artificial Sequence
  Synthetic
ccgttttttttttttacagcaca

SEQ ID NO: 13220 - DNA, 23 bp, Artificial Sequence
  Synthetic
ccgttttttttttttactgtaca

SEQ ID NO: 13221 - DNA, 23 bp, Artificial Sequence
  Synthetic
ccgttttttttttttacatactt

SEQ ID NO: 13222 - DNA, 23 bp, Artificial Sequence
  Synthetic
ccgttttttttttttacaagttc

SEQ ID NO: 13223 - DNA, 23 bp, Artificial Sequence
  Synthetic
ccgttttttttttttcagttatc

SEQ ID NO: 13224 - DNA, 23 bp, Artificial Sequence
  Synthetic
ccgttttttttttttcagttatc

SEQ ID NO: 13225 - DNA, 23 bp, Artificial Sequence
  Synthetic
ccgttttttttttttatagccct

SEQ ID NO: 13226 - DNA, 23 bp, Artificial Sequence
  Synthetic
ccgttttttttttttatagccct

SEQ ID NO: 13227 - DNA, 23 bp, Artificial Sequence
  Synthetic
ccgttttttttttttcaaattcg

SEQ ID NO: 13228 - DNA, 23 bp, Artificial Sequence
  Synthetic
ccgttttttttttttccccaaga

SEQ ID NO: 13229 - DNA, 23 bp, Artificial Sequence
  Synthetic
ccgttttttttttttacaaattc

SEQ ID NO: 13230 - DNA, 23 bp, Artificial Sequence
  Synthetic
ccgttttttttttttcaaatccg

SEQ ID NO: 13231 - DNA, 23 bp, Artificial Sequence
  Synthetic
ccgttttttttttttacacattc

SEQ ID NO: 13232 - DNA, 23 bp, Artificial Sequence
  Synthetic
ccgttttttttttttctccccta

SEQ ID NO: 13233 - DNA, 23 bp, Artificial Sequence
  Synthetic
ccgttttttttttttaaacacca

SEQ ID NO: 13234 - DNA, 23 bp, Artificial Sequence
  Synthetic
ccgttttttttttttgcattcac

SEQ ID NO: 13235 - DNA, 23 bp, Artificial Sequence
  Synthetic
ccgttttttttttttacaggtta

SEQ ID NO: 13236 - DNA, 23 bp, Artificial Sequence
  Synthetic
ccgttttttttttttacaagtta

SEQ ID NO: 13237 - DNA, 23 bp, Artificial Sequence
  Synthetic
ccgttttttttttttacgagtta

SEQ ID NO: 13238 - DNA, 23 bp, Artificial Sequence
  Synthetic
ccgttttttttttttcattatta

SEQ ID NO: 13239 - DNA, 23 bp, Artificial Sequence
  Synthetic
ccgttttttttttttgcgtacca

SEQ ID NO: 13240 - DNA, 23 bp, Artificial Sequence
  Synthetic
ccgttttttttttttaaagagac

SEQ ID NO: 13241 - DNA, 23 bp, Artificial Sequence
  Synthetic
ccgttttttttttttgcaagccc

SEQ ID NO: 13242 - DNA, 23 bp, Artificial Sequence
  Synthetic
ccgttttttttttttgctttttg

SEQ ID NO: 13243 - DNA, 23 bp, Artificial Sequence
  Synthetic
ccgttttttttttttgccctttt

SEQ ID NO: 13244 - DNA, 23 bp, Artificial Sequence
  Synthetic
ccgttttttttttttgccctttc

SEQ ID NO: 13245 - DNA, 23 bp, Artificial Sequence
  Synthetic
ccgttttttttttttgccctttt

SEQ ID NO: 13246 - DNA, 23 bp, Artificial Sequence
  Synthetic
ccgttttttttttttgaccatgg

SEQ ID NO: 13247 - DNA, 23 bp, Artificial Sequence
  Synthetic
ccgttttttttttttgtaacaat

SEQ ID NO: 13248 - DNA, 23 bp, Artificial Sequence
  Synthetic
ccgttttttttttttagctggtt

SEQ ID NO: 13249 - DNA, 23 bp, Artificial Sequence
  Synthetic
ccgttttttttttttggttccat

SEQ ID NO: 13250 - DNA, 23 bp, Artificial Sequence
  Synthetic
ccgttttttttttttgctggttg

SEQ ID NO: 13251 - DNA, 23 bp, Artificial Sequence
  Synthetic
ccgttttttttttttacttggtt

SEQ ID NO: 13252 - DNA, 23 bp, Artificial Sequence
  Synthetic
ccgttttttttttttgctggttg

SEQ ID NO: 13253 - DNA, 23 bp, Artificial Sequence
  Synthetic
ccgttttttttttttacatagga

SEQ ID NO: 13254 - DNA, 23 bp, Artificial Sequence
  Synthetic
ccgttttttttttttagatagga

SEQ ID NO: 13255 - DNA, 23 bp, Artificial Sequence
  Synthetic
ccgttttttttttttacatagga

SEQ ID NO: 13256 - DNA, 23 bp, Artificial Sequence
  Synthetic
ccgttttttttttttcgcgtatt

SEQ ID NO: 13257 - DNA, 23 bp, Artificial Sequence
  Synthetic
ccgttttttttttttgcctgatt

SEQ ID NO: 13258 - DNA, 23 bp, Artificial Sequence
  Synthetic
ccgttttttttttttgacacatg

SEQ ID NO: 13259 - DNA, 23 bp, Artificial Sequence
  Synthetic
ccgttttttttttttaccatagg

SEQ ID NO: 13260 - DNA, 23 bp, Artificial Sequence
  Synthetic
ccgttttttttttttccgtggtt

SEQ ID NO: 13261 - DNA, 23 bp, Artificial Sequence
  Synthetic
ccgttttttttttttcatcgtta

SEQ ID NO: 13262 - DNA, 23 bp, Artificial Sequence
  Synthetic
ccgttttttttttttcataaagt

SEQ ID NO: 13263 - DNA, 23 bp, Artificial Sequence
  Synthetic
ccgttttttttttttgtagtgct

SEQ ID NO: 13264 - DNA, 23 bp, Artificial Sequence
  Synthetic
ccgttttttttttttgtagtgct

SEQ ID NO: 13265 - DNA, 23 bp, Artificial Sequence
  Synthetic
ccgttttttttttttagctacag

SEQ ID NO: 13266 - DNA, 23 bp, Artificial Sequence
  Synthetic
ccgttttttttttttgtacatca

SEQ ID NO: 13267 - DNA, 23 bp, Artificial Sequence
  Synthetic
ccgttttttttttttggattcct

SEQ ID NO: 13268 - DNA, 23 bp, Artificial Sequence
  Synthetic
ccgttttttttttttcatctatg

SEQ ID NO: 13269 - DNA, 23 bp, Artificial Sequence
  Synthetic
ccgttttttttttttacccttgg

SEQ ID NO: 13270 - DNA, 23 bp, Artificial Sequence
  Synthetic
ccgttttttttttttcaaagttc

SEQ ID NO: 13271 - DNA, 23 bp, Artificial Sequence
  Synthetic
ccgttttttttttttactggtac

SEQ ID NO: 13272 - DNA, 23 bp, Artificial Sequence
  Synthetic
ccgttttttttttttcaaagttc

SEQ ID NO: 13273 - DNA, 23 bp, Artificial Sequence
  Synthetic
ccgttttttttttttatcacttt

SEQ ID NO: 13274 - DNA, 23 bp, Artificial Sequence
  Synthetic
ccgttttttttttttctcatttt

SEQ ID NO: 13275 - DNA, 23 bp, Artificial Sequence
  Synthetic
ccgttttttttttttatcatttt

SEQ ID NO: 13276 - DNA, 23 bp, Artificial Sequence
  Synthetic
ccgttttttttttttccctatca

SEQ ID NO: 13277 - DNA, 23 bp, Artificial Sequence
  Synthetic
ccgttttttttttttacaaacca

SEQ ID NO: 13278 - DNA, 23 bp, Artificial Sequence
  Synthetic
ccgttttttttttttccgcagca

SEQ ID NO: 13279 - DNA, 23 bp, Artificial Sequence
  Synthetic
ccgttttttttttttcaaaccat

SEQ ID NO: 13280 - DNA, 23 bp, Artificial Sequence
  Synthetic
ccgttttttttttttaaaaccat

SEQ ID NO: 13281 - DNA, 23 bp, Artificial Sequence
  Synthetic
ccgttttttttttttaccaatat

SEQ ID NO: 13282 - DNA, 23 bp, Artificial Sequence
  Synthetic
ccgttttttttttttccaatatt

SEQ ID NO: 13283 - DNA, 23 bp, Artificial Sequence
  Synthetic
ccgttttttttttttccaatatt

SEQ ID NO: 13284 - DNA, 23 bp, Artificial Sequence
  Synthetic
ccgttttttttttttcctgcact

SEQ ID NO: 13285 - DNA, 23 bp, Artificial Sequence
  Synthetic
ccgttttttttttttagaagtgc

SEQ ID NO: 13286 - DNA, 23 bp, Artificial Sequence
  Synthetic
ccgttttttttttttctcaccga

SEQ ID NO: 13287 - DNA, 23 bp, Artificial Sequence
  Synthetic
ccgttttttttttttgtacaatc

SEQ ID NO: 13288 - DNA, 23 bp, Artificial Sequence
  Synthetic
ccgttttttttttttccaccgac

SEQ ID NO: 13289 - DNA, 23 bp, Artificial Sequence
  Synthetic
ccgttttttttttttccaccgac

SEQ ID NO: 13290 - DNA, 23 bp, Artificial Sequence
  Synthetic
ccgttttttttttttgagttcta

SEQ ID NO: 13291 - DNA, 23 bp, Artificial Sequence
  Synthetic
ccgttttttttttttgttggcaa

SEQ ID NO: 13292 - DNA, 23 bp, Artificial Sequence
  Synthetic
ccgttttttttttttagtgaatt

SEQ ID NO: 13293 - DNA, 23 bp, Artificial Sequence
  Synthetic
ccgttttttttttttcccttatc

SEQ ID NO: 13294 - DNA, 23 bp, Artificial Sequence
  Synthetic
ccgttttttttttttgctgcaac

SEQ ID NO: 13295 - DNA, 23 bp, Artificial Sequence
  Synthetic
ccgttttttttttttctgcacta

SEQ ID NO: 13296 - DNA, 23 bp, Artificial Sequence
  Synthetic
ccgttttttttttttctgcacta

SEQ ID NO: 13297 - DNA, 23 bp, Artificial Sequence
  Synthetic
ccgttttttttttttcagaaggg

SEQ ID NO: 13298 - DNA, 23 bp, Artificial Sequence
  Synthetic
ccgttttttttttttactacaca

SEQ ID NO: 13299 - DNA, 23 bp, Artificial Sequence
  Synthetic
ccgttttttttttttcctaatat

SEQ ID NO: 13300 - DNA, 23 bp, Artificial Sequence
  Synthetic
ccgttttttttttttaaccgaat

SEQ ID NO: 13301 - DNA, 23 bp, Artificial Sequence
  Synthetic
ccgttttttttttttgctgtcaa

SEQ ID NO: 13302 - DNA, 23 bp, Artificial Sequence
  Synthetic
ccgttttttttttttctgggact

SEQ ID NO: 13303 - DNA, 23 bp, Artificial Sequence
  Synthetic
ccgttttttttttttgcgggact

SEQ ID NO: 13304 - DNA, 23 bp, Artificial Sequence
  Synthetic
ccgttttttttttttcacatgga

SEQ ID NO: 13305 - DNA, 23 bp, Artificial Sequence
  Synthetic
ccgttttttttttttcacatgga

SEQ ID NO: 13306 - DNA, 23 bp, Artificial Sequence
  Synthetic
ccgttttttttttttccaacaac

SEQ ID NO: 13307 - DNA, 23 bp, Artificial Sequence
  Synthetic
ccgttttttttttttccaacaac

SEQ ID NO: 13308 - DNA, 23 bp, Artificial Sequence
  Synthetic
ccgttttttttttttaacaggta

SEQ ID NO: 13309 - DNA, 23 bp, Artificial Sequence
  Synthetic
ccgttttttttttttaccaatgt

SEQ ID NO: 13310 - DNA, 23 bp, Artificial Sequence
  Synthetic
ccgttttttttttttagttttgc

SEQ ID NO: 13311 - DNA, 23 bp, Artificial Sequence
  Synthetic
ccgttttttttttttgtgcaact

SEQ ID NO: 13312 - DNA, 23 bp, Artificial Sequence
  Synthetic
ccgttttttttttttagttttgc

SEQ ID NO: 13313 - DNA, 23 bp, Artificial Sequence
  Synthetic
ccgttttttttttttgaatgcaa

SEQ ID NO: 13314 - DNA, 23 bp, Artificial Sequence
  Synthetic
ccgttttttttttttgagttttg

SEQ ID NO: 13315 - DNA, 23 bp, Artificial Sequence
  Synthetic
ccgttttttttttttagttttgc

SEQ ID NO: 13316 - DNA, 23 bp, Artificial Sequence
  Synthetic
ccgttttttttttttcatcgtta

SEQ ID NO: 13317 - DNA, 23 bp, Artificial Sequence
  Synthetic
ccgttttttttttttatcattac

SEQ ID NO: 13318 - DNA, 23 bp, Artificial Sequence
  Synthetic
ccgttttttttttttcatcatta

SEQ ID NO: 13319 - DNA, 23 bp, Artificial Sequence
  Synthetic
ccgttttttttttttccatgccc

SEQ ID NO: 13320 - DNA, 23 bp, Artificial Sequence
  Synthetic
ccgttttttttttttaaagaggt

SEQ ID NO: 13321 - DNA, 23 bp, Artificial Sequence
  Synthetic
ccgttttttttttttaagtggtc

SEQ ID NO: 13322 - DNA, 23 bp, Artificial Sequence
  Synthetic
ccgttttttttttttaagtggtc

SEQ ID NO: 13323 - DNA, 23 bp, Artificial Sequence
  Synthetic
ccgttttttttttttgaactgtt

SEQ ID NO: 13324 - DNA, 23 bp, Artificial Sequence
  Synthetic
ccgttttttttttttggcatagg

SEQ ID NO: 13325 - DNA, 23 bp, Artificial Sequence
  Synthetic
ccgttttttttttttagactccg

SEQ ID NO: 13326 - DNA, 23 bp, Artificial Sequence
  Synthetic
ccgttttttttttttcacacact

SEQ ID NO: 13327 - DNA, 23 bp, Artificial Sequence
  Synthetic
ccgttttttttttttacctgcac

SEQ ID NO: 13328 - DNA, 23 bp, Artificial Sequence
  Synthetic
ccgttttttttttttcaagtgct

SEQ ID NO: 13329 - DNA, 23 bp, Artificial Sequence
  Synthetic
ccgttttttttttttacctgcac

SEQ ID NO: 13330 - DNA, 23 bp, Artificial Sequence
  Synthetic
ccgttttttttttttccaacacc

SEQ ID NO: 13331 - DNA, 23 bp, Artificial Sequence
  Synthetic
ccgttttttttttttgccgctgt

SEQ ID NO: 13332 - DNA, 23 bp, Artificial Sequence
  Synthetic
ccgttttttttttttaatgtgcg

SEQ ID NO: 13333 - DNA, 23 bp, Artificial Sequence
  Synthetic
ccgttttttttttttgccatgac

SEQ ID NO: 13334 - DNA, 23 bp, Artificial Sequence
  Synthetic
ccgttttttttttttgcctgtct

SEQ ID NO: 13335 - DNA, 23 bp, Artificial Sequence
  Synthetic
ccgttttttttttttacagttgc

SEQ ID NO: 13336 - DNA, 23 bp, Artificial Sequence
  Synthetic
ccgttttttttttttacagttgc

SEQ ID NO: 13337 - DNA, 23 bp, Artificial Sequence
  Synthetic
ccgttttttttttttcaatcagt

SEQ ID NO: 13338 - DNA, 23 bp, Artificial Sequence
  Synthetic
ccgttttttttttttacatggtt

SEQ ID NO: 13339 - DNA, 23 bp, Artificial Sequence
  Synthetic
ccgttttttttttttcatggtta

SEQ ID NO: 13340 - DNA, 23 bp, Artificial Sequence
  Synthetic
ccgttttttttttttagaattgc

SEQ ID NO: 13341 - DNA, 23 bp, Artificial Sequence
  Synthetic
ccgttttttttttttagtgtccg

SEQ ID NO: 13342 - DNA, 23 bp, Artificial Sequence
  Synthetic
ccgttttttttttttaaacccag

SEQ ID NO: 13343 - DNA, 23 bp, Artificial Sequence
  Synthetic
ccgttttttttttttagacccag

SEQ ID NO: 13344 - DNA, 23 bp, Artificial Sequence
  Synthetic
ccgttttttttttttgggtattt

SEQ ID NO: 13345 - DNA, 23 bp, Artificial Sequence
  Synthetic
ccgttttttttttttcagttctt

SEQ ID NO: 13346 - DNA, 23 bp, Artificial Sequence
  Synthetic
ccgttttttttttttcagctctt

SEQ ID NO: 13347 - DNA, 23 bp, Artificial Sequence
  Synthetic
ccgttttttttttttgaaatccc

SEQ ID NO: 13348 - DNA, 23 bp, Artificial Sequence
  Synthetic
ccgttttttttttttgtaatccc

SEQ ID NO: 13349 - DNA, 23 bp, Artificial Sequence
  Synthetic
ccgttttttttttttgttcctgc

SEQ ID NO: 13350 - DNA, 23 bp, Artificial Sequence
  Synthetic
ccgttttttttttttagaccgag

SEQ ID NO: 13351 - DNA, 23 bp, Artificial Sequence
  Synthetic
ccgttttttttttttgcctatcc

SEQ ID NO: 13352 - DNA, 23 bp, Artificial Sequence
  Synthetic
ccgttttttttttttacctatcc

SEQ ID NO: 13353 - DNA, 23 bp, Artificial Sequence
  Synthetic
ccgttttttttttttgcggaact

SEQ ID NO: 13354 - DNA, 23 bp, Artificial Sequence
  Synthetic
ccgttttttttttttcagaactt

SEQ ID NO: 13355 - DNA, 23 bp, Artificial Sequence
  Synthetic
ccgttttttttttttcagaactt

SEQ ID NO: 13356 - DNA, 23 bp, Artificial Sequence
  Synthetic
ccgttttttttttttattgttca

SEQ ID NO: 13357 - DNA, 23 bp, Artificial Sequence
  Synthetic
ccgttttttttttttaagaactt

SEQ ID NO: 13358 - DNA, 23 bp, Artificial Sequence
  Synthetic
ccgttttttttttttactgaact

SEQ ID NO: 13359 - DNA, 23 bp, Artificial Sequence
  Synthetic
ccgttttttttttttaccgattt

SEQ ID NO: 13360 - DNA, 23 bp, Artificial Sequence
  Synthetic
ccgttttttttttttcactgatt

SEQ ID NO: 13361 - DNA, 23 bp, Artificial Sequence
  Synthetic
ccgttttttttttttgacaatac

SEQ ID NO: 13362 - DNA, 23 bp, Artificial Sequence
  Synthetic
ccgttttttttttttaatgacaa

SEQ ID NO: 13363 - DNA, 23 bp, Artificial Sequence
  Synthetic
ccgttttttttttttatgacaat

SEQ ID NO: 13364 - DNA, 23 bp, Artificial Sequence
  Synthetic
ccgttttttttttttccagtcgg

SEQ ID NO: 13365 - DNA, 23 bp, Artificial Sequence
  Synthetic
ccgttttttttttttgctgagtg

SEQ ID NO: 13366 - DNA, 23 bp, Artificial Sequence
  Synthetic
ccgttttttttttttgagagtgt

SEQ ID NO: 13367 - DNA, 23 bp, Artificial Sequence
  Synthetic
ccgttttttttttttccagtcgg

SEQ ID NO: 13368 - DNA, 23 bp, Artificial Sequence
  Synthetic
ccgttttttttttttccagtcaa

SEQ ID NO: 13369 - DNA, 23 bp, Artificial Sequence
  Synthetic
ccgttttttttttttctgcaaac

SEQ ID NO: 13370 - DNA, 23 bp, Artificial Sequence
  Synthetic
ccgttttttttttttagctatgc

SEQ ID NO: 13371 - DNA, 23 bp, Artificial Sequence
  Synthetic
ccgttttttttttttaacaaaat

SEQ ID NO: 13372 - DNA, 23 bp, Artificial Sequence
  Synthetic
ccgttttttttttttcaaccagc

SEQ ID NO: 13373 - DNA, 23 bp, Artificial Sequence
  Synthetic
ccgttttttttttttaatcagct

SEQ ID NO: 13374 - DNA, 23 bp, Artificial Sequence
  Synthetic
ccgttttttttttttaatcaact

SEQ ID NO: 13375 - DNA, 23 bp, Artificial Sequence
  Synthetic
ccgttttttttttttcagatgga

SEQ ID NO: 13376 - DNA, 23 bp, Artificial Sequence
  Synthetic
ccgttttttttttttaaggattt

SEQ ID NO: 13377 - DNA, 23 bp, Artificial Sequence
  Synthetic
ccgttttttttttttacgcgagc

SEQ ID NO: 13378 - DNA, 23 bp, Artificial Sequence
  Synthetic
ccgttttttttttttcggcatta

SEQ ID NO: 13379 - DNA, 23 bp, Artificial Sequence
  Synthetic
ccgttttttttttttaccccaac

SEQ ID NO: 13380 - DNA, 23 bp, Artificial Sequence
  Synthetic
ccgttttttttttttaccccaac

SEQ ID NO: 13381 - DNA, 23 bp, Artificial Sequence
  Synthetic
ccgttttttttttttaccccaaa

SEQ ID NO: 13382 - DNA, 23 bp, Artificial Sequence
  Synthetic
ccgttttttttttttacgccaac

SEQ ID NO: 13383 - DNA, 23 bp, Artificial Sequence
  Synthetic
ccgttttttttttttccccaatt

SEQ ID NO: 13384 - DNA, 23 bp, Artificial Sequence
  Synthetic
ccgttttttttttttactcagta

SEQ ID NO: 13385 - DNA, 23 bp, Artificial Sequence
  Synthetic
ccgttttttttttttcctattag

SEQ ID NO: 13386 - DNA, 23 bp, Artificial Sequence
  Synthetic
ccgttttttttttttcctataag

SEQ ID NO: 13387 - DNA, 23 bp, Artificial Sequence
  Synthetic
ccgttttttttttttgatgtagt

SEQ ID NO: 13388 - DNA, 23 bp, Artificial Sequence
  Synthetic
ccgttttttttttttacaaccat

SEQ ID NO: 13389 - DNA, 23 bp, Artificial Sequence
  Synthetic
ccgttttttttttttccaatatt

SEQ ID NO: 13390 - DNA, 23 bp, Artificial Sequence
  Synthetic
ccgttttttttttttccagtatt

SEQ ID NO: 13391 - DNA, 23 bp, Artificial Sequence
  Synthetic
ccgttttttttttttcagtacca

SEQ ID NO: 13392 - DNA, 23 bp, Artificial Sequence
  Synthetic
ccgttttttttttttaggatgaa

SEQ ID NO: 13393 - DNA, 23 bp, Artificial Sequence
  Synthetic
ccgttttttttttttcccagtaa

SEQ ID NO: 13394 - DNA, 23 bp, Artificial Sequence
  Synthetic
ccgttttttttttttatccacat

SEQ ID NO: 13395 - DNA, 23 bp, Artificial Sequence
  Synthetic
ccgttttttttttttgcacagtg

SEQ ID NO: 13396 - DNA, 23 bp, Artificial Sequence
  Synthetic
ccgttttttttttttgcatttag

SEQ ID NO: 13397 - DNA, 23 bp, Artificial Sequence
  Synthetic
ccgttttttttttttgctgcatt

SEQ ID NO: 13398 - DNA, 23 bp, Artificial Sequence
  Synthetic
ccgttttttttttttcagccgta

SEQ ID NO: 13399 - DNA, 23 bp, Artificial Sequence
  Synthetic
ccgttttttttttttaacatcac

SEQ ID NO: 13400 - DNA, 23 bp, Artificial Sequence
  Synthetic
ccgttttttttttttatctgaaa

SEQ ID NO: 13401 - DNA, 23 bp, Artificial Sequence
  Synthetic
ccgttttttttttttgcacagat

SEQ ID NO: 13402 - DNA, 23 bp, Artificial Sequence
  Synthetic
ccgttttttttttttaagtaaca

SEQ ID NO: 13403 - DNA, 23 bp, Artificial Sequence
  Synthetic
ccgttttttttttttacagtcgc

SEQ ID NO: 13404 - DNA, 23 bp, Artificial Sequence
  Synthetic
ccgttttttttttttctactaga

SEQ ID NO: 13405 - DNA, 23 bp, Artificial Sequence
  Synthetic
ccgttttttttttttcgagttct

SEQ ID NO: 13406 - DNA, 23 bp, Artificial Sequence
  Synthetic
ccgttttttttttttagtcttca

SEQ ID NO: 13407 - DNA, 23 bp, Artificial Sequence
  Synthetic
ccgttttttttttttctgggagg

SEQ ID NO: 13408 - DNA, 23 bp, Artificial Sequence
  Synthetic
ccgttttttttttttaaaacgta

SEQ ID NO: 13409 - DNA, 23 bp, Artificial Sequence
  Synthetic
ccgttttttttttttacccaggt

SEQ ID NO: 13410 - DNA, 23 bp, Artificial Sequence
  Synthetic
ccgttttttttttttcacacagc

SEQ ID NO: 13411 - DNA, 23 bp, Artificial Sequence
  Synthetic
ccgttttttttttttgatccggg

SEQ ID NO: 13412 - DNA, 23 bp, Artificial Sequence
  Synthetic
ccgttttttttttttccgagagt

SEQ ID NO: 13413 - DNA, 23 bp, Artificial Sequence
  Synthetic
ccgttttttttttttaccactga

SEQ ID NO: 13414 - DNA, 23 bp, Artificial Sequence
  Synthetic
ccgttttttttttttggtacgat

SEQ ID NO: 13415 - DNA, 23 bp, Artificial Sequence
  Synthetic
ccgttttttttttttcaagttta

SEQ ID NO: 13416 - DNA, 23 bp, Artificial Sequence
  Synthetic
ccgttttttttttttaaactttt

SEQ ID NO: 13417 - DNA, 23 bp, Artificial Sequence
  Synthetic
ccgttttttttttttctttaggt

SEQ ID NO: 13418 - DNA, 23 bp, Artificial Sequence
  Synthetic
ccgttttttttttttaggtcccg

SEQ ID NO: 13419 - DNA, 23 bp, Artificial Sequence
  Synthetic
ccgttttttttttttacccttct

SEQ ID NO: 13420 - DNA, 23 bp, Artificial Sequence
  Synthetic
ccgttttttttttttctgtacca

SEQ ID NO: 13421 - DNA, 23 bp, Artificial Sequence
  Synthetic
ccgttttttttttttcaacaaaa

SEQ ID NO: 13422 - DNA, 23 bp, Artificial Sequence
  Synthetic
ccgttttttttttttacaaaatc

SEQ ID NO: 13423 - DNA, 23 bp, Artificial Sequence
  Synthetic
ccgttttttttttttatacagct

SEQ ID NO: 13424 - DNA, 23 bp, Artificial Sequence
  Synthetic
ccgttttttttttttctttcggt

SEQ ID NO: 13425 - DNA, 23 bp, Artificial Sequence
  Synthetic
ccgttttttttttttcaggccgg

SEQ ID NO: 13426 - DNA, 23 bp, Artificial Sequence
  Synthetic
ccgttttttttttttgaggccgg

SEQ ID NO: 13427 - DNA, 23 bp, Artificial Sequence
  Synthetic
ccgttttttttttttcctgcaca

SEQ ID NO: 13428 - DNA, 23 bp, Artificial Sequence
  Synthetic
ccgttttttttttttgcaaaaat

SEQ ID NO: 13429 - DNA, 23 bp, Artificial Sequence
  Synthetic
ccgttttttttttttacaagatc

SEQ ID NO: 13430 - DNA, 23 bp, Artificial Sequence
  Synthetic
ccgttttttttttttgacatagt

SEQ ID NO: 13431 - DNA, 23 bp, Artificial Sequence
  Synthetic
ccgttttttttttttcagcacgt

SEQ ID NO: 13432 - DNA, 23 bp, Artificial Sequence
  Synthetic
ccgttttttttttttcagccaac

SEQ ID NO: 13433 - DNA, 23 bp, Artificial Sequence
  Synthetic
ccgttttttttttttgcagtcag

SEQ ID NO: 13434 - DNA, 23 bp, Artificial Sequence
  Synthetic
ccgttttttttttttcaactagc

SEQ ID NO: 13435 - DNA, 23 bp, Artificial Sequence
  Synthetic
ccgttttttttttttaaccacac

SEQ ID NO: 13436 - DNA, 23 bp, Artificial Sequence
  Synthetic
ccgttttttttttttagccgtcc

SEQ ID NO: 13437 - DNA, 23 bp, Artificial Sequence
  Synthetic
ccgttttttttttttccctacta

SEQ ID NO: 13438 - DNA, 23 bp, Artificial Sequence
  Synthetic
ccgttttttttttttaaatcggc

SEQ ID NO: 13439 - DNA, 23 bp, Artificial Sequence
  Synthetic
ccgttttttttttttatcaagga

SEQ ID NO: 13440 - DNA, 23 bp, Artificial Sequence
  Synthetic
ccgttttttttttttaagagcac

SEQ ID NO: 13441 - DNA, 23 bp, Artificial Sequence
  Synthetic
ccgttttttttttttaggggaca

SEQ ID NO: 13442 - DNA, 23 bp, Artificial Sequence
  Synthetic
ccgttttttttttttcttgtatg

SEQ ID NO: 13443 - DNA, 23 bp, Artificial Sequence
  Synthetic
ccgttttttttttttgtatagga

SEQ ID NO: 13444 - DNA, 23 bp, Artificial Sequence
  Synthetic
ccgttttttttttttcattccca

SEQ ID NO: 13445 - DNA, 23 bp, Artificial Sequence
  Synthetic
ccgttttttttttttcaagggcg

SEQ ID NO: 13446 - DNA, 23 bp, Artificial Sequence
  Synthetic
ccgttttttttttttgtaacagg

SEQ ID NO: 13447 - DNA, 23 bp, Artificial Sequence
  Synthetic
ccgttttttttttttgaatgaag

SEQ ID NO: 13448 - DNA, 23 bp, Artificial Sequence
  Synthetic
ccgttttttttttttcacctggt

SEQ ID NO: 13449 - DNA, 23 bp, Artificial Sequence
  Synthetic
ccgttttttttttttgcacaaca

SEQ ID NO: 13450 - DNA, 23 bp, Artificial Sequence
  Synthetic
ccgttttttttttttgcacacca

SEQ ID NO: 13451 - DNA, 23 bp, Artificial Sequence
  Synthetic
ccgttttttttttttgatgggca

SEQ ID NO: 13452 - DNA, 23 bp, Artificial Sequence
  Synthetic
ccgttttttttttttaaggctag

SEQ ID NO: 13453 - DNA, 23 bp, Artificial Sequence
  Synthetic
ccgttttttttttttagcctatg

SEQ ID NO: 13454 - DNA, 23 bp, Artificial Sequence
  Synthetic
ccgttttttttttttcctggaca

SEQ ID NO: 13455 - DNA, 23 bp, Artificial Sequence
  Synthetic
ccgttttttttttttacgacccc

SEQ ID NO: 13456 - DNA, 23 bp, Artificial Sequence
  Synthetic
ccgttttttttttttgtacaatc

SEQ ID NO: 13457 - DNA, 23 bp, Artificial Sequence
  Synthetic
ccgttttttttttttacgggacc

SEQ ID NO: 13458 - DNA, 23 bp, Artificial Sequence
  Synthetic
ccgttttttttttttactccggg

SEQ ID NO: 13459 - DNA, 23 bp, Artificial Sequence
  Synthetic
ccgttttttttttttaatttctg

SEQ ID NO: 13460 - DNA, 23 bp, Artificial Sequence
  Synthetic
ccgttttttttttttctatctgc

SEQ ID NO: 13461 - DNA, 23 bp, Artificial Sequence
  Synthetic
ccgttttttttttttgtgcttac

SEQ ID NO: 13462 - DNA, 23 bp, Artificial Sequence
  Synthetic
ccgttttttttttttactataca

SEQ ID NO: 13463 - DNA, 23 bp, Artificial Sequence
  Synthetic
ccgttttttttttttaccacaca

SEQ ID NO: 13464 - DNA, 23 bp, Artificial Sequence
  Synthetic
ccgttttttttttttaccataca

SEQ ID NO: 13465 - DNA, 23 bp, Artificial Sequence
  Synthetic
ccgttttttttttttactattca

SEQ ID NO: 13466 - DNA, 23 bp, Artificial Sequence
  Synthetic
ccgttttttttttttactataca

SEQ ID NO: 13467 - DNA, 23 bp, Artificial Sequence
  Synthetic
ccgttttttttttttacaacaca

SEQ ID NO: 13468 - DNA, 23 bp, Artificial Sequence
  Synthetic
ccgttttttttttttacagcaca

SEQ ID NO: 13469 - DNA, 23 bp, Artificial Sequence
  Synthetic
ccgttttttttttttactgtaca

SEQ ID NO: 13470 - DNA, 23 bp, Artificial Sequence
  Synthetic
ccgttttttttttttacatactt

SEQ ID NO: 13471 - DNA, 23 bp, Artificial Sequence
  Synthetic
ccgttttttttttttacaagttc

SEQ ID NO: 13472 - DNA, 23 bp, Artificial Sequence
  Synthetic
ccgttttttttttttcagttatc

SEQ ID NO: 13473 - DNA, 23 bp, Artificial Sequence
  Synthetic
ccgttttttttttttcagttatc

SEQ ID NO: 13474 - DNA, 23 bp, Artificial Sequence
  Synthetic
ccgttttttttttttatagccct

SEQ ID NO: 13475 - DNA, 23 bp, Artificial Sequence
  Synthetic
ccgttttttttttttatagccct

SEQ ID NO: 13476 - DNA, 23 bp, Artificial Sequence
  Synthetic
ccgttttttttttttacaaattc

SEQ ID NO: 13477 - DNA, 23 bp, Artificial Sequence
  Synthetic
ccgttttttttttttcaaatccg

SEQ ID NO: 13478 - DNA, 23 bp, Artificial Sequence
  Synthetic
ccgttttttttttttacacacat

SEQ ID NO: 13479 - DNA, 23 bp, Artificial Sequence
  Synthetic
ccgttttttttttttaaacacca

SEQ ID NO: 13480 - DNA, 23 bp, Artificial Sequence
  Synthetic
ccgttttttttttttgcattcac

SEQ ID NO: 13481 - DNA, 23 bp, Artificial Sequence
  Synthetic
ccgttttttttttttacaggtta

SEQ ID NO: 13482 - DNA, 23 bp, Artificial Sequence
  Synthetic
ccgttttttttttttacaagtta

SEQ ID NO: 13483 - DNA, 23 bp, Artificial Sequence
  Synthetic
ccgttttttttttttcattatta

SEQ ID NO: 13484 - DNA, 23 bp, Artificial Sequence
  Synthetic
ccgttttttttttttaaagagac

SEQ ID NO: 13485 - DNA, 23 bp, Artificial Sequence
  Synthetic
ccgttttttttttttgcaagccc

SEQ ID NO: 13486 - DNA, 23 bp, Artificial Sequence
  Synthetic
ccgttttttttttttgccctttt

SEQ ID NO: 13487 - DNA, 23 bp, Artificial Sequence
  Synthetic
ccgttttttttttttgaccatgg

SEQ ID NO: 13488 - DNA, 23 bp, Artificial Sequence
  Synthetic
ccgttttttttttttagctggtt

SEQ ID NO: 13489 - DNA, 23 bp, Artificial Sequence
  Synthetic
ccgttttttttttttacatagga

SEQ ID NO: 13490 - DNA, 23 bp, Artificial Sequence
  Synthetic
ccgttttttttttttagatagga

SEQ ID NO: 13491 - DNA, 23 bp, Artificial Sequence
  Synthetic
ccgttttttttttttcgcgtatt

SEQ ID NO: 13492 - DNA, 23 bp, Artificial Sequence
  Synthetic
ccgttttttttttttgcctgatt

SEQ ID NO: 13493 - DNA, 23 bp, Artificial Sequence
  Synthetic
ccgttttttttttttaccatagg

SEQ ID NO: 13494 - DNA, 23 bp, Artificial Sequence
  Synthetic
ccgttttttttttttgtagtgct

SEQ ID NO: 13495 - DNA, 23 bp, Artificial Sequence
  Synthetic
ccgttttttttttttgtagtgct

SEQ ID NO: 13496 - DNA, 23 bp, Artificial Sequence
  Synthetic
ccgttttttttttttgtacatca

SEQ ID NO: 13497 - DNA, 23 bp, Artificial Sequence
  Synthetic
ccgttttttttttttcaaagttc

SEQ ID NO: 13498 - DNA, 23 bp, Artificial Sequence
  Synthetic
ccgttttttttttttcaaagttc

SEQ ID NO: 13499 - DNA, 23 bp, Artificial Sequence
  Synthetic
ccgttttttttttttatcacttt

SEQ ID NO: 13500 - DNA, 23 bp, Artificial Sequence
  Synthetic
ccgttttttttttttctcatttt

SEQ ID NO: 13501 - DNA, 23 bp, Artificial Sequence
  Synthetic
ccgttttttttttttacaaacca

SEQ ID NO: 13502 - DNA, 23 bp, Artificial Sequence
  Synthetic
ccgttttttttttttcaaaccat

SEQ ID NO: 13503 - DNA, 23 bp, Artificial Sequence
  Synthetic
ccgttttttttttttccaatatt

SEQ ID NO: 13504 - DNA, 23 bp, Artificial Sequence
  Synthetic
ccgttttttttttttcctgcact

SEQ ID NO: 13505 - DNA, 23 bp, Artificial Sequence
  Synthetic
ccgttttttttttttctgcacta

SEQ ID NO: 13506 - DNA, 23 bp, Artificial Sequence
  Synthetic
ccgttttttttttttctcaccga

SEQ ID NO: 13507 - DNA, 23 bp, Artificial Sequence
  Synthetic
ccgttttttttttttgtacaatc

SEQ ID NO: 13508 - DNA, 23 bp, Artificial Sequence
  Synthetic
ccgttttttttttttccaccgac

SEQ ID NO: 13509 - DNA, 23 bp, Artificial Sequence
  Synthetic
ccgttttttttttttgttggcaa

SEQ ID NO: 13510 - DNA, 23 bp, Artificial Sequence
  Synthetic
ccgttttttttttttagtgaatt

SEQ ID NO: 13511 - DNA, 23 bp, Artificial Sequence
  Synthetic
ccgttttttttttttccttatca

SEQ ID NO: 13512 - DNA, 23 bp, Artificial Sequence
  Synthetic
ccgttttttttttttgctgcaac

SEQ ID NO: 13513 - DNA, 23 bp, Artificial Sequence
  Synthetic
ccgttttttttttttctgatacc

SEQ ID NO: 13514 - DNA, 23 bp, Artificial Sequence
  Synthetic
ccgttttttttttttcctaatat

SEQ ID NO: 13515 - DNA, 23 bp, Artificial Sequence
  Synthetic
ccgttttttttttttgctgtcaa

SEQ ID NO: 13516 - DNA, 23 bp, Artificial Sequence
  Synthetic
ccgttttttttttttctgggact

SEQ ID NO: 13517 - DNA, 23 bp, Artificial Sequence
  Synthetic
ccgttttttttttttcacatgga

SEQ ID NO: 13518 - DNA, 23 bp, Artificial Sequence
  Synthetic
ccgttttttttttttccaacaac

SEQ ID NO: 13519 - DNA, 23 bp, Artificial Sequence
  Synthetic
ccgttttttttttttccaacaac

SEQ ID NO: 13520 - DNA, 23 bp, Artificial Sequence
  Synthetic
ccgttttttttttttaacaggta

SEQ ID NO: 13521 - DNA, 23 bp, Artificial Sequence
  Synthetic
ccgttttttttttttagttttgc

SEQ ID NO: 13522 - DNA, 23 bp, Artificial Sequence
  Synthetic
ccgttttttttttttagttttgc

SEQ ID NO: 13523 - DNA, 23 bp, Artificial Sequence
  Synthetic
ccgttttttttttttacctgcac

SEQ ID NO: 13524 - DNA, 23 bp, Artificial Sequence
  Synthetic
ccgttttttttttttcatcgtta

SEQ ID NO: 13525 - DNA, 23 bp, Artificial Sequence
  Synthetic
ccgttttttttttttatcattac

SEQ ID NO: 13526 - DNA, 23 bp, Artificial Sequence
  Synthetic
ccgttttttttttttccatgccc

SEQ ID NO: 13527 - DNA, 23 bp, Artificial Sequence
  Synthetic
ccgttttttttttttaagtggtc

SEQ ID NO: 13528 - DNA, 23 bp, Artificial Sequence
  Synthetic
ccgttttttttttttggcatagg

SEQ ID NO: 13529 - DNA, 23 bp, Artificial Sequence
  Synthetic
ccgttttttttttttagactccg

SEQ ID NO: 13530 - DNA, 23 bp, Artificial Sequence
  Synthetic
ccgttttttttttttccaacacc

SEQ ID NO: 13531 - DNA, 23 bp, Artificial Sequence
  Synthetic
ccgttttttttttttgccgctgt

SEQ ID NO: 13532 - DNA, 23 bp, Artificial Sequence
  Synthetic
ccgttttttttttttgccatgac

SEQ ID NO: 13533 - DNA, 23 bp, Artificial Sequence
  Synthetic
ccgttttttttttttgcctgtct

SEQ ID NO: 13534 - DNA, 23 bp, Artificial Sequence
  Synthetic
ccgttttttttttttacagttgc

SEQ ID NO: 13535 - DNA, 23 bp, Artificial Sequence
  Synthetic
ccgttttttttttttacagttgc

SEQ ID NO: 13536 - DNA, 23 bp, Artificial Sequence
  Synthetic
ccgttttttttttttcaatcagt

SEQ ID NO: 13537 - DNA, 23 bp, Artificial Sequence
  Synthetic
ccgttttttttttttacatggtt

SEQ ID NO: 13538 - DNA, 23 bp, Artificial Sequence
  Synthetic
ccgttttttttttttcatggtta

SEQ ID NO: 13539 - DNA, 23 bp, Artificial Sequence
  Synthetic
ccgttttttttttttagaattgc

SEQ ID NO: 13540 - DNA, 23 bp, Artificial Sequence
  Synthetic
ccgttttttttttttaaacccag

SEQ ID NO: 13541 - DNA, 23 bp, Artificial Sequence
  Synthetic
ccgttttttttttttagacccag

SEQ ID NO: 13542 - DNA, 23 bp, Artificial Sequence
  Synthetic
ccgttttttttttttgggtattt

SEQ ID NO: 13543 - DNA, 23 bp, Artificial Sequence
  Synthetic
ccgttttttttttttcagttctt

SEQ ID NO: 13544 - DNA, 23 bp, Artificial Sequence
  Synthetic
ccgttttttttttttcagctctt

SEQ ID NO: 13545 - DNA, 23 bp, Artificial Sequence
  Synthetic
ccgttttttttttttgaaatccc

SEQ ID NO: 13546 - DNA, 23 bp, Artificial Sequence
  Synthetic
ccgttttttttttttgtaatccc

SEQ ID NO: 13547 - DNA, 23 bp, Artificial Sequence
  Synthetic
ccgttttttttttttgttcctgc

SEQ ID NO: 13548 - DNA, 23 bp, Artificial Sequence
  Synthetic
ccgttttttttttttagaccgag

SEQ ID NO: 13549 - DNA, 23 bp, Artificial Sequence
  Synthetic
ccgttttttttttttgcctatcc

SEQ ID NO: 13550 - DNA, 23 bp, Artificial Sequence
  Synthetic
ccgttttttttttttcagaactt

SEQ ID NO: 13551 - DNA, 23 bp, Artificial Sequence
  Synthetic
ccgttttttttttttcagaactt

SEQ ID NO: 13552 - DNA, 23 bp, Artificial Sequence
  Synthetic
ccgttttttttttttactgaact

SEQ ID NO: 13553 - DNA, 23 bp, Artificial Sequence
  Synthetic
ccgttttttttttttaccgattt

SEQ ID NO: 13554 - DNA, 23 bp, Artificial Sequence
  Synthetic
ccgttttttttttttcactgatt

SEQ ID NO: 13555 - DNA, 23 bp, Artificial Sequence
  Synthetic
ccgttttttttttttatgacaat

SEQ ID NO: 13556 - DNA, 23 bp, Artificial Sequence
  Synthetic
ccgttttttttttttgctgagtg

SEQ ID NO: 13557 - DNA, 23 bp, Artificial Sequence
  Synthetic
ccgttttttttttttcgagagtg

SEQ ID NO: 13558 - DNA, 23 bp, Artificial Sequence
  Synthetic
ccgttttttttttttccagtcgg

SEQ ID NO: 13559 - DNA, 23 bp, Artificial Sequence
  Synthetic
ccgttttttttttttaacaaaat

SEQ ID NO: 13560 - DNA, 23 bp, Artificial Sequence
  Synthetic
ccgttttttttttttaaggattt

SEQ ID NO: 13561 - DNA, 23 bp, Artificial Sequence
  Synthetic
ccgttttttttttttacgcgagc

SEQ ID NO: 13562 - DNA, 23 bp, Artificial Sequence
  Synthetic
ccgttttttttttttcggcatta

SEQ ID NO: 13563 - DNA, 23 bp, Artificial Sequence
  Synthetic
ccgttttttttttttgatgtagt

SEQ ID NO: 13564 - DNA, 23 bp, Artificial Sequence
  Synthetic
ccgttttttttttttcagtacca

SEQ ID NO: 13565 - DNA, 23 bp, Artificial Sequence
  Synthetic
ccgttttttttttttatccacat

SEQ ID NO: 13566 - DNA, 23 bp, Artificial Sequence
  Synthetic
ccgttttttttttttcagccgta

SEQ ID NO: 13567 - DNA, 23 bp, Artificial Sequence
  Synthetic
ccgttttttttttttacaaaatc

SEQ ID NO: 13568 - DNA, 23 bp, Artificial Sequence
  Synthetic
ccgttttttttttttatacagct

SEQ ID NO: 13569 - DNA, 23 bp, Artificial Sequence
  Synthetic
ccgttttttttttttcaggccgg

SEQ ID NO: 13570 - DNA, 23 bp, Artificial Sequence
  Synthetic
ccgttttttttttttgcaaaaat

SEQ ID NO: 13571 - DNA, 23 bp, Artificial Sequence
  Synthetic
ccgttttttttttttactataca

SEQ ID NO: 13572 - DNA, 23 bp, Artificial Sequence
  Synthetic
ccgttttttttttttaccacaca

SEQ ID NO: 13573 - DNA, 23 bp, Artificial Sequence
  Synthetic
ccgttttttttttttaccataca

SEQ ID NO: 13574 - DNA, 23 bp, Artificial Sequence
  Synthetic
ccgttttttttttttctatgcaa

SEQ ID NO: 13575 - DNA, 23 bp, Artificial Sequence
  Synthetic
ccgttttttttttttactataca

SEQ ID NO: 13576 - DNA, 23 bp, Artificial Sequence
  Synthetic
ccgttttttttttttctgtacaa

SEQ ID NO: 13577 - DNA, 23 bp, Artificial Sequence
  Synthetic
ccgttttttttttttcagcacaa

SEQ ID NO: 13578 - DNA, 23 bp, Artificial Sequence
  Synthetic
ccgttttttttttttactataca

SEQ ID NO: 13579 - DNA, 23 bp, Artificial Sequence
  Synthetic
ccgttttttttttttactattca

SEQ ID NO: 13580 - DNA, 23 bp, Artificial Sequence
  Synthetic
ccgttttttttttttacaagttc

SEQ ID NO: 13581 - DNA, 23 bp, Artificial Sequence
  Synthetic
ccgttttttttttttcagttatc

SEQ ID NO: 13582 - DNA, 23 bp, Artificial Sequence
  Synthetic
ccgttttttttttttatagccct

SEQ ID NO: 13583 - DNA, 23 bp, Artificial Sequence
  Synthetic
ccgttttttttttttcctgcact

SEQ ID NO: 13584 - DNA, 23 bp, Artificial Sequence
  Synthetic
ccgttttttttttttatagccct

SEQ ID NO: 13585 - DNA, 23 bp, Artificial Sequence
  Synthetic
ccgttttttttttttcaaattcg

SEQ ID NO: 13586 - DNA, 23 bp, Artificial Sequence
  Synthetic
ccgttttttttttttcaaacacc

SEQ ID NO: 13587 - DNA, 23 bp, Artificial Sequence
  Synthetic
ccgttttttttttttgcattcac

SEQ ID NO: 13588 - DNA, 23 bp, Artificial Sequence
  Synthetic
ccgttttttttttttgcattcac

SEQ ID NO: 13589 - DNA, 23 bp, Artificial Sequence
  Synthetic
ccgttttttttttttacaagtta

SEQ ID NO: 13590 - DNA, 23 bp, Artificial Sequence
  Synthetic
ccgttttttttttttcgcattat

SEQ ID NO: 13591 - DNA, 23 bp, Artificial Sequence
  Synthetic
ccgttttttttttttgcgtacca

SEQ ID NO: 13592 - DNA, 23 bp, Artificial Sequence
  Synthetic
ccgttttttttttttaagagacc

SEQ ID NO: 13593 - DNA, 23 bp, Artificial Sequence
  Synthetic
ccgttttttttttttgccctttt

SEQ ID NO: 13594 - DNA, 23 bp, Artificial Sequence
  Synthetic
ccgttttttttttttcgcccttt

SEQ ID NO: 13595 - DNA, 23 bp, Artificial Sequence
  Synthetic
ccgttttttttttttcagctggt

SEQ ID NO: 13596 - DNA, 23 bp, Artificial Sequence
  Synthetic
ccgttttttttttttgctggttg

SEQ ID NO: 13597 - DNA, 23 bp, Artificial Sequence
  Synthetic
ccgttttttttttttcagctggt

SEQ ID NO: 13598 - DNA, 23 bp, Artificial Sequence
  Synthetic
ccgttttttttttttacatagga

SEQ ID NO: 13599 - DNA, 23 bp, Artificial Sequence
  Synthetic
ccgttttttttttttacgcgtat

SEQ ID NO: 13600 - DNA, 23 bp, Artificial Sequence
  Synthetic
ccgttttttttttttattcacaa

SEQ ID NO: 13601 - DNA, 23 bp, Artificial Sequence
  Synthetic
ccgttttttttttttaccatagg

SEQ ID NO: 13602 - DNA, 23 bp, Artificial Sequence
  Synthetic
ccgttttttttttttccgtggtt

SEQ ID NO: 13603 - DNA, 23 bp, Artificial Sequence
  Synthetic
ccgttttttttttttcataaagt

SEQ ID NO: 13604 - DNA, 23 bp, Artificial Sequence
  Synthetic
ccgttttttttttttagtgcttt

SEQ ID NO: 13605 - DNA, 23 bp, Artificial Sequence
  Synthetic
ccgttttttttttttagtacatc

SEQ ID NO: 13606 - DNA, 23 bp, Artificial Sequence
  Synthetic
ccgttttttttttttacccatgg

SEQ ID NO: 13607 - DNA, 23 bp, Artificial Sequence
  Synthetic
ccgttttttttttttgcctatgg

SEQ ID NO: 13608 - DNA, 23 bp, Artificial Sequence
  Synthetic
ccgttttttttttttcagaactg

SEQ ID NO: 13609 - DNA, 23 bp, Artificial Sequence
  Synthetic
ccgttttttttttttcagaagca

SEQ ID NO: 13610 - DNA, 23 bp, Artificial Sequence
  Synthetic
ccgttttttttttttcaaagttc

SEQ ID NO: 13611 - DNA, 23 bp, Artificial Sequence
  Synthetic
ccgttttttttttttacttttgt

SEQ ID NO: 13612 - DNA, 23 bp, Artificial Sequence
  Synthetic
ccgttttttttttttccctatca

SEQ ID NO: 13613 - DNA, 23 bp, Artificial Sequence
  Synthetic
ccgttttttttttttcaaaccat

SEQ ID NO: 13614 - DNA, 23 bp, Artificial Sequence
  Synthetic
ccgttttttttttttcaaaccat

SEQ ID NO: 13615 - DNA, 23 bp, Artificial Sequence
  Synthetic
ccgttttttttttttaccaatat

SEQ ID NO: 13616 - DNA, 23 bp, Artificial Sequence
  Synthetic
ccgttttttttttttcaagtgcc

SEQ ID NO: 13617 - DNA, 23 bp, Artificial Sequence
  Synthetic
ccgttttttttttttctacctgc

SEQ ID NO: 13618 - DNA, 23 bp, Artificial Sequence
  Synthetic
ccgttttttttttttctcaccga

SEQ ID NO: 13619 - DNA, 23 bp, Artificial Sequence
  Synthetic
ccgttttttttttttgtacaatc

SEQ ID NO: 13620 - DNA, 23 bp, Artificial Sequence
  Synthetic
ccgttttttttttttccaccgac

SEQ ID NO: 13621 - DNA, 23 bp, Artificial Sequence
  Synthetic
ccgttttttttttttagtgaatt

SEQ ID NO: 13622 - DNA, 23 bp, Artificial Sequence
  Synthetic
ccgttttttttttttcccttatc

SEQ ID NO: 13623 - DNA, 23 bp, Artificial Sequence
  Synthetic
ccgttttttttttttgctgcaac

SEQ ID NO: 13624 - DNA, 23 bp, Artificial Sequence
  Synthetic
ccgttttttttttttctgcacta

SEQ ID NO: 13625 - DNA, 23 bp, Artificial Sequence
  Synthetic
ccgttttttttttttactgcact

SEQ ID NO: 13626 - DNA, 23 bp, Artificial Sequence
  Synthetic
ccgttttttttttttcctaatat

SEQ ID NO: 13627 - DNA, 23 bp, Artificial Sequence
  Synthetic
ccgttttttttttttaagcggga

SEQ ID NO: 13628 - DNA, 23 bp, Artificial Sequence
  Synthetic
ccgttttttttttttcacatgga

SEQ ID NO: 13629 - DNA, 23 bp, Artificial Sequence
  Synthetic
ccgttttttttttttcaacaaca

SEQ ID NO: 13630 - DNA, 23 bp, Artificial Sequence
  Synthetic
ccgttttttttttttaacaggta

SEQ ID NO: 13631 - DNA, 23 bp, Artificial Sequence
  Synthetic
ccgttttttttttttcaatgtgc

SEQ ID NO: 13632 - DNA, 23 bp, Artificial Sequence
  Synthetic
ccgttttttttttttagttttgc

SEQ ID NO: 13633 - DNA, 23 bp, Artificial Sequence
  Synthetic
ccgttttttttttttagttttgc

SEQ ID NO: 13634 - DNA, 23 bp, Artificial Sequence
  Synthetic
ccgttttttttttttcatacttc

SEQ ID NO: 13635 - DNA, 23 bp, Artificial Sequence
  Synthetic
ccgttttttttttttcatacttc

SEQ ID NO: 13636 - DNA, 23 bp, Artificial Sequence
  Synthetic
ccgttttttttttttcatcgtta

SEQ ID NO: 13637 - DNA, 23 bp, Artificial Sequence
  Synthetic
ccgttttttttttttcatcatta

SEQ ID NO: 13638 - DNA, 23 bp, Artificial Sequence
  Synthetic
ccgttttttttttttccatgctc

SEQ ID NO: 13639 - DNA, 23 bp, Artificial Sequence
  Synthetic
ccgttttttttttttaagaagta

SEQ ID NO: 13640 - DNA, 23 bp, Artificial Sequence
  Synthetic
ccgttttttttttttaagtggtc

SEQ ID NO: 13641 - DNA, 23 bp, Artificial Sequence
  Synthetic
ccgttttttttttttggcatagg

SEQ ID NO: 13642 - DNA, 23 bp, Artificial Sequence
  Synthetic
ccgttttttttttttagactccg

SEQ ID NO: 13643 - DNA, 23 bp, Artificial Sequence
  Synthetic
ccgttttttttttttagattccg

SEQ ID NO: 13644 - DNA, 23 bp, Artificial Sequence
  Synthetic
ccgttttttttttttcacacact

SEQ ID NO: 13645 - DNA, 23 bp, Artificial Sequence
  Synthetic
ccgttttttttttttacctgcac

SEQ ID NO: 13646 - DNA, 23 bp, Artificial Sequence
  Synthetic
ccgttttttttttttacctgcac

SEQ ID NO: 13647 - DNA, 23 bp, Artificial Sequence
  Synthetic
ccgttttttttttttaacatcag

SEQ ID NO: 13648 - DNA, 23 bp, Artificial Sequence
  Synthetic
ccgttttttttttttggcatagg

SEQ ID NO: 13649 - DNA, 23 bp, Artificial Sequence
  Synthetic
ccgttttttttttttctgtcaat

SEQ ID NO: 13650 - DNA, 23 bp, Artificial Sequence
  Synthetic
ccgttttttttttttacagttgc

SEQ ID NO: 13651 - DNA, 23 bp, Artificial Sequence
  Synthetic
ccgttttttttttttccaatcag

SEQ ID NO: 13652 - DNA, 23 bp, Artificial Sequence
  Synthetic
ccgttttttttttttcatggtta

SEQ ID NO: 13653 - DNA, 23 bp, Artificial Sequence
  Synthetic
ccgttttttttttttgaattgcg

SEQ ID NO: 13654 - DNA, 23 bp, Artificial Sequence
  Synthetic
ccgttttttttttttaaacccag

SEQ ID NO: 13655 - DNA, 23 bp, Artificial Sequence
  Synthetic
ccgttttttttttttagacccag

SEQ ID NO: 13656 - DNA, 23 bp, Artificial Sequence
  Synthetic
ccgttttttttttttagacccag

SEQ ID NO: 13657 - DNA, 23 bp, Artificial Sequence
  Synthetic
ccgttttttttttttgggtattt

SEQ ID NO: 13658 - DNA, 23 bp, Artificial Sequence
  Synthetic
ccgttttttttttttgtaatccc

SEQ ID NO: 13659 - DNA, 23 bp, Artificial Sequence
  Synthetic
ccgttttttttttttgttcctgc

SEQ ID NO: 13660 - DNA, 23 bp, Artificial Sequence
  Synthetic
ccgttttttttttttcctatcct

SEQ ID NO: 13661 - DNA, 23 bp, Artificial Sequence
  Synthetic
ccgttttttttttttcagaactt

SEQ ID NO: 13662 - DNA, 23 bp, Artificial Sequence
  Synthetic
ccgttttttttttttaccgattt

SEQ ID NO: 13663 - DNA, 23 bp, Artificial Sequence
  Synthetic
ccgttttttttttttacactgat

SEQ ID NO: 13664 - DNA, 23 bp, Artificial Sequence
  Synthetic
ccgttttttttttttccgatttc

SEQ ID NO: 13665 - DNA, 23 bp, Artificial Sequence
  Synthetic
ccgttttttttttttgctttgac

SEQ ID NO: 13666 - DNA, 23 bp, Artificial Sequence
  Synthetic
ccgttttttttttttactaaaac

SEQ ID NO: 13667 - DNA, 23 bp, Artificial Sequence
  Synthetic
ccgttttttttttttactaaaac

SEQ ID NO: 13668 - DNA, 23 bp, Artificial Sequence
  Synthetic
ccgttttttttttttgaaagcac

SEQ ID NO: 13669 - DNA, 23 bp, Artificial Sequence
  Synthetic
ccgttttttttttttcactgaaa

SEQ ID NO: 13670 - DNA, 23 bp, Artificial Sequence
  Synthetic
ccgttttttttttttagcaggta

SEQ ID NO: 13671 - DNA, 23 bp, Artificial Sequence
  Synthetic
ccgttttttttttttaactaaaa

SEQ ID NO: 13672 - DNA, 23 bp, Artificial Sequence
  Synthetic
ccgttttttttttttctgcaaac

SEQ ID NO: 13673 - DNA, 23 bp, Artificial Sequence
  Synthetic
ccgttttttttttttccagtcga

SEQ ID NO: 13674 - DNA, 23 bp, Artificial Sequence
  Synthetic
ccgttttttttttttgctgagtg

SEQ ID NO: 13675 - DNA, 23 bp, Artificial Sequence
  Synthetic
ccgttttttttttttgctgagag

SEQ ID NO: 13676 - DNA, 23 bp, Artificial Sequence
  Synthetic
ccgttttttttttttccagtcgg

SEQ ID NO: 13677 - DNA, 23 bp, Artificial Sequence
  Synthetic
ccgttttttttttttcagtcaag

SEQ ID NO: 13678 - DNA, 23 bp, Artificial Sequence
  Synthetic
ccgttttttttttttagctatgc

SEQ ID NO: 13679 - DNA, 23 bp, Artificial Sequence
  Synthetic
ccgttttttttttttcaacttag

SEQ ID NO: 13680 - DNA, 23 bp, Artificial Sequence
  Synthetic
ccgttttttttttttaatgcaac

SEQ ID NO: 13681 - DNA, 23 bp, Artificial Sequence
  Synthetic
ccgttttttttttttacaaccag

SEQ ID NO: 13682 - DNA, 23 bp, Artificial Sequence
  Synthetic
ccgttttttttttttaatcagct

SEQ ID NO: 13683 - DNA, 23 bp, Artificial Sequence
  Synthetic
ccgttttttttttttcaatcagc

SEQ ID NO: 13684 - DNA, 23 bp, Artificial Sequence
  Synthetic
ccgttttttttttttaaggattt

SEQ ID NO: 13685 - DNA, 23 bp, Artificial Sequence
  Synthetic
ccgttttttttttttaccattgc

SEQ ID NO: 13686 - DNA, 23 bp, Artificial Sequence
  Synthetic
ccgttttttttttttacgcgagc

SEQ ID NO: 13687 - DNA, 23 bp, Artificial Sequence
  Synthetic
ccgttttttttttttgccacaat

SEQ ID NO: 13688 - DNA, 23 bp, Artificial Sequence
  Synthetic
ccgttttttttttttcggcatta

SEQ ID NO: 13689 - DNA, 23 bp, Artificial Sequence
  Synthetic
ccgttttttttttttccagctaa

SEQ ID NO: 13690 - DNA, 23 bp, Artificial Sequence
  Synthetic
ccgttttttttttttaactcagt

SEQ ID NO: 13691 - DNA, 23 bp, Artificial Sequence
  Synthetic
ccgttttttttttttgatgtagt

SEQ ID NO: 13692 - DNA, 23 bp, Artificial Sequence
  Synthetic
ccgttttttttttttacaaccat

SEQ ID NO: 13693 - DNA, 23 bp, Artificial Sequence
  Synthetic
ccgttttttttttttacacagtg

SEQ ID NO: 13694 - DNA, 23 bp, Artificial Sequence
  Synthetic
ccgttttttttttttcttatgtg

SEQ ID NO: 13695 - DNA, 23 bp, Artificial Sequence
  Synthetic
ccgttttttttttttcagccgta

SEQ ID NO: 13696 - DNA, 23 bp, Artificial Sequence
  Synthetic
ccgttttttttttttagcatgga

SEQ ID NO: 13697 - DNA, 23 bp, Artificial Sequence
  Synthetic
ccgttttttttttttaaacatca

SEQ ID NO: 13698 - DNA, 23 bp, Artificial Sequence
  Synthetic
ccgttttttttttttaacaaaat

SEQ ID NO: 13699 - DNA, 23 bp, Artificial Sequence
  Synthetic
ccgttttttttttttaatcccat

SEQ ID NO: 13700 - DNA, 23 bp, Artificial Sequence
  Synthetic
ccgttttttttttttacaaaaat

SEQ ID NO: 13701 - DNA, 23 bp, Artificial Sequence
  Synthetic
ccgttttttttttttatacagct

SEQ ID NO: 13702 - DNA, 23 bp, Artificial Sequence
  Synthetic
ccgttttttttttttcattcggt

SEQ ID NO: 13703 - DNA, 23 bp, Artificial Sequence
  Synthetic
ccgttttttttttttaggccggg

SEQ ID NO: 13704 - DNA, 23 bp, Artificial Sequence
  Synthetic
ccgttttttttttttacaagatc

SEQ ID NO: 13705 - DNA, 23 bp, Artificial Sequence
  Synthetic
ccgttttttttttttacaagttc

SEQ ID NO: 13706 - DNA, 23 bp, Artificial Sequence
  Synthetic
ccgttttttttttttcagttatc

SEQ ID NO: 13707 - DNA, 23 bp, Artificial Sequence
  Synthetic
ccgttttttttttttatagccct

SEQ ID NO: 13708 - DNA, 23 bp, Artificial Sequence
  Synthetic
ccgttttttttttttcaggagtc

SEQ ID NO: 13709 - DNA, 23 bp, Artificial Sequence
  Synthetic
ccgttttttttttttctacctgc

SEQ ID NO: 13710 - DNA, 23 bp, Artificial Sequence
  Synthetic
ccgttttttttttttctgcactg

SEQ ID NO: 13711 - DNA, 23 bp, Artificial Sequence
  Synthetic
ccgttttttttttttatagccct

SEQ ID NO: 13712 - DNA, 23 bp, Artificial Sequence
  Synthetic
ccgttttttttttttacaaattc

SEQ ID NO: 13713 - DNA, 23 bp, Artificial Sequence
  Synthetic
ccgttttttttttttcaaattcg

SEQ ID NO: 13714 - DNA, 23 bp, Artificial Sequence
  Synthetic
ccgttttttttttttgcattcac

SEQ ID NO: 13715 - DNA, 23 bp, Artificial Sequence
  Synthetic
ccgttttttttttttacaagtta

SEQ ID NO: 13716 - DNA, 23 bp, Artificial Sequence
  Synthetic
ccgttttttttttttccctttta

SEQ ID NO: 13717 - DNA, 23 bp, Artificial Sequence
  Synthetic
ccgttttttttttttcagctggt

SEQ ID NO: 13718 - DNA, 23 bp, Artificial Sequence
  Synthetic
ccgttttttttttttcctctggt

SEQ ID NO: 13719 - DNA, 23 bp, Artificial Sequence
  Synthetic
ccgttttttttttttacatagga

SEQ ID NO: 13720 - DNA, 23 bp, Artificial Sequence
  Synthetic
ccgttttttttttttcatcatca

SEQ ID NO: 13721 - DNA, 23 bp, Artificial Sequence
  Synthetic
ccgttttttttttttcatcttta

SEQ ID NO: 13722 - DNA, 23 bp, Artificial Sequence
  Synthetic
ccgttttttttttttagctacag

SEQ ID NO: 13723 - DNA, 23 bp, Artificial Sequence
  Synthetic
ccgttttttttttttagggattc

SEQ ID NO: 13724 - DNA, 23 bp, Artificial Sequence
  Synthetic
ccgttttttttttttacttttgt

SEQ ID NO: 13725 - DNA, 23 bp, Artificial Sequence
  Synthetic
ccgttttttttttttgaaggcaa

SEQ ID NO: 13726 - DNA, 23 bp, Artificial Sequence
  Synthetic
ccgttttttttttttacaaacca

SEQ ID NO: 13727 - DNA, 23 bp, Artificial Sequence
  Synthetic
ccgttttttttttttaaaccatg

SEQ ID NO: 13728 - DNA, 23 bp, Artificial Sequence
  Synthetic
ccgttttttttttttgccaatat

SEQ ID NO: 13729 - DNA, 23 bp, Artificial Sequence
  Synthetic
ccgttttttttttttcaagtgcc

SEQ ID NO: 13730 - DNA, 23 bp, Artificial Sequence
  Synthetic
ccgttttttttttttctacctgc

SEQ ID NO: 13731 - DNA, 23 bp, Artificial Sequence
  Synthetic
ccgttttttttttttctgcacta

SEQ ID NO: 13732 - DNA, 23 bp, Artificial Sequence
  Synthetic
ccgttttttttttttctcaccga

SEQ ID NO: 13733 - DNA, 23 bp, Artificial Sequence
  Synthetic
ccgttttttttttttgtacaatc

SEQ ID NO: 13734 - DNA, 23 bp, Artificial Sequence
  Synthetic
ccgttttttttttttacccaccg

SEQ ID NO: 13735 - DNA, 23 bp, Artificial Sequence
  Synthetic
ccgttttttttttttctcaccga

SEQ ID NO: 13736 - DNA, 23 bp, Artificial Sequence
  Synthetic
ccgttttttttttttagtgaatt

SEQ ID NO: 13737 - DNA, 23 bp, Artificial Sequence
  Synthetic
ccgttttttttttttagcccaaa

SEQ ID NO: 13738 - DNA, 23 bp, Artificial Sequence
  Synthetic
ccgttttttttttttggctgcaa

SEQ ID NO: 13739 - DNA, 23 bp, Artificial Sequence
  Synthetic
ccgttttttttttttcctaatat

SEQ ID NO: 13740 - DNA, 23 bp, Artificial Sequence
  Synthetic
ccgttttttttttttcacatgga

SEQ ID NO: 13741 - DNA, 23 bp, Artificial Sequence
  Synthetic
ccgttttttttttttccaatatt

SEQ ID NO: 13742 - DNA, 23 bp, Artificial Sequence
  Synthetic
ccgttttttttttttcaacaaca

SEQ ID NO: 13743 - DNA, 23 bp, Artificial Sequence
  Synthetic
ccgttttttttttttctatctcc

SEQ ID NO: 13744 - DNA, 23 bp, Artificial Sequence
  Synthetic
ccgttttttttttttaacaggta

SEQ ID NO: 13745 - DNA, 23 bp, Artificial Sequence
  Synthetic
ccgttttttttttttagttttgc

SEQ ID NO: 13746 - DNA, 23 bp, Artificial Sequence
  Synthetic
ccgttttttttttttagttttgc

SEQ ID NO: 13747 - DNA, 23 bp, Artificial Sequence
  Synthetic
ccgttttttttttttcctgcact

SEQ ID NO: 13748 - DNA, 23 bp, Artificial Sequence
  Synthetic
ccgttttttttttttcatcatta

SEQ ID NO: 13749 - DNA, 23 bp, Artificial Sequence
  Synthetic
ccgttttttttttttggcatagg

SEQ ID NO: 13750 - DNA, 23 bp, Artificial Sequence
  Synthetic
ccgttttttttttttagactccg

SEQ ID NO: 13751 - DNA, 23 bp, Artificial Sequence
  Synthetic
ccgttttttttttttaacatcag

SEQ ID NO: 13752 - DNA, 23 bp, Artificial Sequence
  Synthetic
ccgttttttttttttgcctgtct

SEQ ID NO: 13753 - DNA, 23 bp, Artificial Sequence
  Synthetic
ccgttttttttttttctgtcaat

SEQ ID NO: 13754 - DNA, 23 bp, Artificial Sequence
  Synthetic
ccgttttttttttttacagttgc

SEQ ID NO: 13755 - DNA, 23 bp, Artificial Sequence
  Synthetic
ccgttttttttttttccaatcag

SEQ ID NO: 13756 - DNA, 23 bp, Artificial Sequence
  Synthetic
ccgttttttttttttcatggtta

SEQ ID NO: 13757 - DNA, 23 bp, Artificial Sequence
  Synthetic
ccgttttttttttttgaattgcg

SEQ ID NO: 13758 - DNA, 23 bp, Artificial Sequence
  Synthetic
ccgttttttttttttaagtgtca

SEQ ID NO: 13759 - DNA, 23 bp, Artificial Sequence
  Synthetic
ccgttttttttttttaaacccag

SEQ ID NO: 13760 - DNA, 23 bp, Artificial Sequence
  Synthetic
ccgttttttttttttgggtattt

SEQ ID NO: 13761 - DNA, 23 bp, Artificial Sequence
  Synthetic
ccgttttttttttttaacggaac

SEQ ID NO: 13762 - DNA, 23 bp, Artificial Sequence
  Synthetic
ccgttttttttttttgaaatccc

SEQ ID NO: 13763 - DNA, 23 bp, Artificial Sequence
  Synthetic
ccgttttttttttttgttcctgc

SEQ ID NO: 13764 - DNA, 23 bp, Artificial Sequence
  Synthetic
ccgttttttttttttagaccgag

SEQ ID NO: 13765 - DNA, 23 bp, Artificial Sequence
  Synthetic
ccgttttttttttttgcctatcc

SEQ ID NO: 13766 - DNA, 23 bp, Artificial Sequence
  Synthetic
ccgttttttttttttgcggaact

SEQ ID NO: 13767 - DNA, 23 bp, Artificial Sequence
  Synthetic
ccgttttttttttttcaatagac

SEQ ID NO: 13768 - DNA, 23 bp, Artificial Sequence
  Synthetic
ccgttttttttttttaccgattt

SEQ ID NO: 13769 - DNA, 23 bp, Artificial Sequence
  Synthetic
ccgttttttttttttctgatttc

SEQ ID NO: 13770 - DNA, 23 bp, Artificial Sequence
  Synthetic
ccgttttttttttttctgcaaac

SEQ ID NO: 13771 - DNA, 23 bp, Artificial Sequence
  Synthetic
ccgttttttttttttccagtcga

SEQ ID NO: 13772 - DNA, 23 bp, Artificial Sequence
  Synthetic
ccgttttttttttttctgagtgt

SEQ ID NO: 13773 - DNA, 23 bp, Artificial Sequence
  Synthetic
ccgttttttttttttccagtcgg

SEQ ID NO: 13774 - DNA, 23 bp, Artificial Sequence
  Synthetic
ccgttttttttttttagctatgc

SEQ ID NO: 13775 - DNA, 23 bp, Artificial Sequence
  Synthetic
ccgttttttttttttcaacttag

SEQ ID NO: 13776 - DNA, 23 bp, Artificial Sequence
  Synthetic
ccgttttttttttttaatgcaac

SEQ ID NO: 13777 - DNA, 23 bp, Artificial Sequence
  Synthetic
ccgttttttttttttcaaccagc

SEQ ID NO: 13778 - DNA, 23 bp, Artificial Sequence
  Synthetic
ccgttttttttttttacaaaatc

SEQ ID NO: 13779 - DNA, 23 bp, Artificial Sequence
  Synthetic
ccgttttttttttttatacagct

SEQ ID NO: 13780 - DNA, 23 bp, Artificial Sequence
  Synthetic
ccgttttttttttttcaggccgg

SEQ ID NO: 13781 - DNA, 23 bp, Artificial Sequence
  Synthetic
ccgttttttttttttacctgcac

SEQ ID NO: 13782 - DNA, 23 bp, Artificial Sequence
  Synthetic
ccgttttttttttttctcaataa

SEQ ID NO: 13783 - DNA, 23 bp, Artificial Sequence
  Synthetic
ccgttttttttttttcaaaaatg

SEQ ID NO: 13784 - DNA, 23 bp, Artificial Sequence
  Synthetic
ccgttttttttttttacaataca

SEQ ID NO: 13785 - DNA, 23 bp, Artificial Sequence
  Synthetic
ccgttttttttttttacaagatc

SEQ ID NO: 13786 - DNA, 23 bp, Artificial Sequence
  Synthetic
ccgttttttttttttgctcactc

SEQ ID NO: 13787 - DNA, 23 bp, Artificial Sequence
  Synthetic
ccgttttttttttttgctctctc

SEQ ID NO: 13788 - DNA, 23 bp, Artificial Sequence
  Synthetic
ccgttttttttttttgctctcta

SEQ ID NO: 13789 - DNA, 23 bp, Artificial Sequence
  Synthetic
ccgttttttttttttgctctcta

SEQ ID NO: 13790 - DNA, 23 bp, Artificial Sequence
  Synthetic
ccgttttttttttttgctctcta

SEQ ID NO: 13791 - DNA, 23 bp, Artificial Sequence
  Synthetic
ccgttttttttttttgagctccc

SEQ ID NO: 13792 - DNA, 23 bp, Artificial Sequence
  Synthetic
ccgttttttttttttgcatacag

SEQ ID NO: 13793 - DNA, 23 bp, Artificial Sequence
  Synthetic
ccgttttttttttttgggaatga

SEQ ID NO: 13794 - DNA, 23 bp, Artificial Sequence
  Synthetic
ccgttttttttttttgggaatga

SEQ ID NO: 13795 - DNA, 23 bp, Artificial Sequence
  Synthetic
ccgttttttttttttgatcatgc

SEQ ID NO: 13796 - DNA, 23 bp, Artificial Sequence
  Synthetic
ccgttttttttttttgatcatgc

SEQ ID NO: 13797 - DNA, 23 bp, Artificial Sequence
  Synthetic
ccgttttttttttttccgacctg

SEQ ID NO: 13798 - DNA, 23 bp, Artificial Sequence
  Synthetic
ccgttttttttttttcggcaagt

SEQ ID NO: 13799 - DNA, 23 bp, Artificial Sequence
  Synthetic
ccgttttttttttttgcagcatc

SEQ ID NO: 13800 - DNA, 23 bp, Artificial Sequence
  Synthetic
ccgttttttttttttgcagcatc

SEQ ID NO: 13801 - DNA, 23 bp, Artificial Sequence
  Synthetic
ccgttttttttttttggagctcc

SEQ ID NO: 13802 - DNA, 23 bp, Artificial Sequence
  Synthetic
ccgttttttttttttggagctcc

SEQ ID NO: 13803 - DNA, 23 bp, Artificial Sequence
  Synthetic
ccgttttttttttttggagctcc

SEQ ID NO: 13804 - DNA, 23 bp, Artificial Sequence
  Synthetic
ccgttttttttttttagttcaag

SEQ ID NO: 13805 - DNA, 23 bp, Artificial Sequence
  Synthetic
ccgttttttttttttagttcaag

SEQ ID NO: 13806 - DNA, 23 bp, Artificial Sequence
  Synthetic
ccgttttttttttttaggggtga

SEQ ID NO: 13807 - DNA, 23 bp, Artificial Sequence
  Synthetic
ccgttttttttttttaggggtga

SEQ ID NO: 13808 - DNA, 23 bp, Artificial Sequence
  Synthetic
ccgttttttttttttgcctggat

SEQ ID NO: 13809 - DNA, 23 bp, Artificial Sequence
  Synthetic
ccgttttttttttttggtgaaga

SEQ ID NO: 13810 - DNA, 23 bp, Artificial Sequence
  Synthetic
ccgttttttttttttcacgggaa

SEQ ID NO: 13811 - DNA, 23 bp, Artificial Sequence
  Synthetic
ccgttttttttttttacaaacta

SEQ ID NO: 13812 - DNA, 23 bp, Artificial Sequence
  Synthetic
ccgttttttttttttccaggtgt

SEQ ID NO: 13813 - DNA, 23 bp, Artificial Sequence
  Synthetic
ccgttttttttttttcgcgcgcc

SEQ ID NO: 13814 - DNA, 23 bp, Artificial Sequence
  Synthetic
ccgttttttttttttggacgagg

SEQ ID NO: 13815 - DNA, 23 bp, Artificial Sequence
  Synthetic
ccgttttttttttttgtccgagc

SEQ ID NO: 13816 - DNA, 23 bp, Artificial Sequence
  Synthetic
ccgttttttttttttcgcgggag

SEQ ID NO: 13817 - DNA, 23 bp, Artificial Sequence
  Synthetic
ccgttttttttttttatccacct

SEQ ID NO: 13818 - DNA, 23 bp, Artificial Sequence
  Synthetic
ccgttttttttttttgcccacgg

SEQ ID NO: 13819 - DNA, 23 bp, Artificial Sequence
  Synthetic
ccgttttttttttttccccctgc

SEQ ID NO: 13820 - DNA, 23 bp, Artificial Sequence
  Synthetic
ccgttttttttttttcgctctcg

SEQ ID NO: 13821 - DNA, 23 bp, Artificial Sequence
  Synthetic
ccgttttttttttttacatcgtc

SEQ ID NO: 13822 - DNA, 23 bp, Artificial Sequence
  Synthetic
ccgttttttttttttactataca

SEQ ID NO: 13823 - DNA, 23 bp, Artificial Sequence
  Synthetic
ccgttttttttttttaccacaca

SEQ ID NO: 13824 - DNA, 23 bp, Artificial Sequence
  Synthetic
ccgttttttttttttaccataca

SEQ ID NO: 13825 - DNA, 23 bp, Artificial Sequence
  Synthetic
ccgttttttttttttctatgcaa

SEQ ID NO: 13826 - DNA, 23 bp, Artificial Sequence
  Synthetic
ccgttttttttttttctatacaa

SEQ ID NO: 13827 - DNA, 23 bp, Artificial Sequence
  Synthetic
ccgttttttttttttactataca

SEQ ID NO: 13828 - DNA, 23 bp, Artificial Sequence
  Synthetic
ccgttttttttttttctgtacaa

SEQ ID NO: 13829 - DNA, 23 bp, Artificial Sequence
  Synthetic
ccgttttttttttttcagcacaa

SEQ ID NO: 13830 - DNA, 23 bp, Artificial Sequence
  Synthetic
ccgttttttttttttcatacttc

SEQ ID NO: 13831 - DNA, 23 bp, Artificial Sequence
  Synthetic
ccgttttttttttttacaagttc

SEQ ID NO: 13832 - DNA, 23 bp, Artificial Sequence
  Synthetic
ccgttttttttttttcagttatc

SEQ ID NO: 13833 - DNA, 23 bp, Artificial Sequence
  Synthetic
ccgttttttttttttatagccct

SEQ ID NO: 13834 - DNA, 23 bp, Artificial Sequence
  Synthetic
ccgttttttttttttcaggagtc

SEQ ID NO: 13835 - DNA, 23 bp, Artificial Sequence
  Synthetic
ccgttttttttttttctacctgc

SEQ ID NO: 13836 - DNA, 23 bp, Artificial Sequence
  Synthetic
ccgttttttttttttctgcactg

SEQ ID NO: 13837 - DNA, 23 bp, Artificial Sequence
  Synthetic
ccgttttttttttttatagccct

SEQ ID NO: 13838 - DNA, 23 bp, Artificial Sequence
  Synthetic
ccgttttttttttttacaaattc

SEQ ID NO: 13839 - DNA, 23 bp, Artificial Sequence
  Synthetic
ccgttttttttttttcaaattcg

SEQ ID NO: 13840 - DNA, 23 bp, Artificial Sequence
  Synthetic
ccgttttttttttttcaaacacc

SEQ ID NO: 13841 - DNA, 23 bp, Artificial Sequence
  Synthetic
ccgttttttttttttgcattcac

SEQ ID NO: 13842 - DNA, 23 bp, Artificial Sequence
  Synthetic
ccgttttttttttttacaggtta

SEQ ID NO: 13843 - DNA, 23 bp, Artificial Sequence
  Synthetic
ccgttttttttttttacaagtta

SEQ ID NO: 13844 - DNA, 23 bp, Artificial Sequence
  Synthetic
ccgttttttttttttcattatta

SEQ ID NO: 13845 - DNA, 23 bp, Artificial Sequence
  Synthetic
ccgttttttttttttgcgtacca

SEQ ID NO: 13846 - DNA, 23 bp, Artificial Sequence
  Synthetic
ccgttttttttttttgccaagct

SEQ ID NO: 13847 - DNA, 23 bp, Artificial Sequence
  Synthetic
ccgttttttttttttaaagagac

SEQ ID NO: 13848 - DNA, 23 bp, Artificial Sequence
  Synthetic
ccgttttttttttttaaagagac

SEQ ID NO: 13849 - DNA, 23 bp, Artificial Sequence
  Synthetic
ccgttttttttttttcaagccca

SEQ ID NO: 13850 - DNA, 23 bp, Artificial Sequence
  Synthetic
ccgttttttttttttgccctttt

SEQ ID NO: 13851 - DNA, 23 bp, Artificial Sequence
  Synthetic
ccgttttttttttttgccctttc

SEQ ID NO: 13852 - DNA, 23 bp, Artificial Sequence
  Synthetic
ccgttttttttttttgaccatgg

SEQ ID NO: 13853 - DNA, 23 bp, Artificial Sequence
  Synthetic
ccgttttttttttttcagctggt

SEQ ID NO: 13854 - DNA, 23 bp, Artificial Sequence
  Synthetic
ccgttttttttttttgctggttg

SEQ ID NO: 13855 - DNA, 23 bp, Artificial Sequence
  Synthetic
ccgttttttttttttcctctggt

SEQ ID NO: 13856 - DNA, 23 bp, Artificial Sequence
  Synthetic
ccgttttttttttttacatagga

SEQ ID NO: 13857 - DNA, 23 bp, Artificial Sequence
  Synthetic
ccgttttttttttttacatagga

SEQ ID NO: 13858 - DNA, 23 bp, Artificial Sequence
  Synthetic
ccgttttttttttttcatcatca

SEQ ID NO: 13859 - DNA, 23 bp, Artificial Sequence
  Synthetic
ccgttttttttttttacgcgtat

SEQ ID NO: 13860 - DNA, 23 bp, Artificial Sequence
  Synthetic
ccgttttttttttttattcacaa

SEQ ID NO: 13861 - DNA, 23 bp, Artificial Sequence
  Synthetic
ccgttttttttttttgacacgtg

SEQ ID NO: 13862 - DNA, 23 bp, Artificial Sequence
  Synthetic
ccgttttttttttttaccatagg

SEQ ID NO: 13863 - DNA, 23 bp, Artificial Sequence
  Synthetic
ccgttttttttttttcatcttta

SEQ ID NO: 13864 - DNA, 23 bp, Artificial Sequence
  Synthetic
ccgttttttttttttcataaagt

SEQ ID NO: 13865 - DNA, 23 bp, Artificial Sequence
  Synthetic
ccgttttttttttttagtgcttt

SEQ ID NO: 13866 - DNA, 23 bp, Artificial Sequence
  Synthetic
ccgttttttttttttagctacag

SEQ ID NO: 13867 - DNA, 23 bp, Artificial Sequence
  Synthetic
ccgttttttttttttagtacatc

SEQ ID NO: 13868 - DNA, 23 bp, Artificial Sequence
  Synthetic
ccgttttttttttttagggattc

SEQ ID NO: 13869 - DNA, 23 bp, Artificial Sequence
  Synthetic
ccgttttttttttttacccatgg

SEQ ID NO: 13870 - DNA, 23 bp, Artificial Sequence
  Synthetic
ccgttttttttttttgcctatgg

SEQ ID NO: 13871 - DNA, 23 bp, Artificial Sequence
  Synthetic
ccgttttttttttttcagaagca

SEQ ID NO: 13872 - DNA, 23 bp, Artificial Sequence
  Synthetic
ccgttttttttttttcaaagttc

SEQ ID NO: 13873 - DNA, 23 bp, Artificial Sequence
  Synthetic
ccgttttttttttttcaaagttc

SEQ ID NO: 13874 - DNA, 23 bp, Artificial Sequence
  Synthetic
ccgttttttttttttgagtgaag

SEQ ID NO: 13875 - DNA, 23 bp, Artificial Sequence
  Synthetic
ccgttttttttttttactggtac

SEQ ID NO: 13876 - DNA, 23 bp, Artificial Sequence
  Synthetic
ccgttttttttttttctcaagga

SEQ ID NO: 13877 - DNA, 23 bp, Artificial Sequence
  Synthetic
ccgttttttttttttccaagttc

SEQ ID NO: 13878 - DNA, 23 bp, Artificial Sequence
  Synthetic
ccgttttttttttttacttttgt

SEQ ID NO: 13879 - DNA, 23 bp, Artificial Sequence
  Synthetic
ccgttttttttttttgaaggcaa

SEQ ID NO: 13880 - DNA, 23 bp, Artificial Sequence
  Synthetic
ccgttttttttttttataggtca

SEQ ID NO: 13881 - DNA, 23 bp, Artificial Sequence
  Synthetic
ccgttttttttttttccctatca

SEQ ID NO: 13882 - DNA, 23 bp, Artificial Sequence
  Synthetic
ccgttttttttttttacaaacca

SEQ ID NO: 13883 - DNA, 23 bp, Artificial Sequence
  Synthetic
ccgttttttttttttaaaccatg

SEQ ID NO: 13884 - DNA, 23 bp, Artificial Sequence
  Synthetic
ccgttttttttttttgccaatat

SEQ ID NO: 13885 - DNA, 23 bp, Artificial Sequence
  Synthetic
ccgttttttttttttcaagtgcc

SEQ ID NO: 13886 - DNA, 23 bp, Artificial Sequence
  Synthetic
ccgttttttttttttctacctgc

SEQ ID NO: 13887 - DNA, 23 bp, Artificial Sequence
  Synthetic
ccgttttttttttttctcaccga

SEQ ID NO: 13888 - DNA, 23 bp, Artificial Sequence
  Synthetic
ccgttttttttttttgtacaatc

SEQ ID NO: 13889 - DNA, 23 bp, Artificial Sequence
  Synthetic
ccgttttttttttttccaccgac

SEQ ID NO: 13890 - DNA, 23 bp, Artificial Sequence
  Synthetic
ccgttttttttttttctcaccga

SEQ ID NO: 13891 - DNA, 23 bp, Artificial Sequence
  Synthetic
ccgttttttttttttacccaccg

SEQ ID NO: 13892 - DNA, 23 bp, Artificial Sequence
  Synthetic
ccgttttttttttttgagttcta

SEQ ID NO: 13893 - DNA, 23 bp, Artificial Sequence
  Synthetic
ccgttttttttttttgttggcaa

SEQ ID NO: 13894 - DNA, 23 bp, Artificial Sequence
  Synthetic
ccgttttttttttttagtgaatt

SEQ ID NO: 13895 - DNA, 23 bp, Artificial Sequence
  Synthetic
ccgttttttttttttcccttatc

SEQ ID NO: 13896 - DNA, 23 bp, Artificial Sequence
  Synthetic
ccgttttttttttttaactgcct

SEQ ID NO: 13897 - DNA, 23 bp, Artificial Sequence
  Synthetic
ccgttttttttttttagcccaaa

SEQ ID NO: 13898 - DNA, 23 bp, Artificial Sequence
  Synthetic
ccgttttttttttttggctgcaa

SEQ ID NO: 13899 - DNA, 23 bp, Artificial Sequence
  Synthetic
ccgttttttttttttccctccac

SEQ ID NO: 13900 - DNA, 23 bp, Artificial Sequence
  Synthetic
ccgttttttttttttctgatatc

SEQ ID NO: 13901 - DNA, 23 bp, Artificial Sequence
  Synthetic
ccgttttttttttttctgcacta

SEQ ID NO: 13902 - DNA, 23 bp, Artificial Sequence
  Synthetic
ccgttttttttttttgaaggagc

SEQ ID NO: 13903 - DNA, 23 bp, Artificial Sequence
  Synthetic
ccgttttttttttttactgcact

SEQ ID NO: 13904 - DNA, 23 bp, Artificial Sequence
  Synthetic
ccgttttttttttttcctaatat

SEQ ID NO: 13905 - DNA, 23 bp, Artificial Sequence
  Synthetic
ccgttttttttttttgctgcttt

SEQ ID NO: 13906 - DNA, 23 bp, Artificial Sequence
  Synthetic
ccgttttttttttttgggacgaa

SEQ ID NO: 13907 - DNA, 23 bp, Artificial Sequence
  Synthetic
ccgttttttttttttgctgtcaa

SEQ ID NO: 13908 - DNA, 23 bp, Artificial Sequence
  Synthetic
ccgttttttttttttgggacttt

SEQ ID NO: 13909 - DNA, 23 bp, Artificial Sequence
  Synthetic
ccgttttttttttttaagcggga

SEQ ID NO: 13910 - DNA, 23 bp, Artificial Sequence
  Synthetic
ccgttttttttttttcacatgga

SEQ ID NO: 13911 - DNA, 23 bp, Artificial Sequence
  Synthetic
ccgttttttttttttccaatatt

SEQ ID NO: 13912 - DNA, 23 bp, Artificial Sequence
  Synthetic
ccgttttttttttttcaacaaca

SEQ ID NO: 13913 - DNA, 23 bp, Artificial Sequence
  Synthetic
ccgttttttttttttcaacaaca

SEQ ID NO: 13914 - DNA, 23 bp, Artificial Sequence
  Synthetic
ccgttttttttttttctgggtgg

SEQ ID NO: 13915 - DNA, 23 bp, Artificial Sequence
  Synthetic
ccgttttttttttttctatctcc

SEQ ID NO: 13916 - DNA, 23 bp, Artificial Sequence
  Synthetic
ccgttttttttttttaacaggta

SEQ ID NO: 13917 - DNA, 23 bp, Artificial Sequence
  Synthetic
ccgttttttttttttaccaatgt

SEQ ID NO: 13918 - DNA, 23 bp, Artificial Sequence
  Synthetic
ccgttttttttttttaacagata

SEQ ID NO: 13919 - DNA, 23 bp, Artificial Sequence
  Synthetic
ccgttttttttttttagttttgc

SEQ ID NO: 13920 - DNA, 23 bp, Artificial Sequence
  Synthetic
ccgttttttttttttagttttgc

SEQ ID NO: 13921 - DNA, 23 bp, Artificial Sequence
  Synthetic
ccgttttttttttttcatcgtta

SEQ ID NO: 13922 - DNA, 23 bp, Artificial Sequence
  Synthetic
ccgttttttttttttcagcactg

SEQ ID NO: 13923 - DNA, 23 bp, Artificial Sequence
  Synthetic
ccgttttttttttttcatcatta

SEQ ID NO: 13924 - DNA, 23 bp, Artificial Sequence
  Synthetic
ccgttttttttttttcatcatta

SEQ ID NO: 13925 - DNA, 23 bp, Artificial Sequence
  Synthetic
ccgttttttttttttccatgccc

SEQ ID NO: 13926 - DNA, 23 bp, Artificial Sequence
  Synthetic
ccgttttttttttttaagaagta

SEQ ID NO: 13927 - DNA, 23 bp, Artificial Sequence
  Synthetic
ccgttttttttttttagtggtcc

SEQ ID NO: 13928 - DNA, 23 bp, Artificial Sequence
  Synthetic
ccgttttttttttttggcatagg

SEQ ID NO: 13929 - DNA, 23 bp, Artificial Sequence
  Synthetic
ccgttttttttttttagactccg

SEQ ID NO: 13930 - DNA, 23 bp, Artificial Sequence
  Synthetic
ccgttttttttttttcacacact

SEQ ID NO: 13931 - DNA, 23 bp, Artificial Sequence
  Synthetic
ccgttttttttttttcaagcttt

SEQ ID NO: 13932 - DNA, 23 bp, Artificial Sequence
  Synthetic
ccgttttttttttttacctgcac

SEQ ID NO: 13933 - DNA, 23 bp, Artificial Sequence
  Synthetic
ccgttttttttttttacctgcac

SEQ ID NO: 13934 - DNA, 23 bp, Artificial Sequence
  Synthetic
ccgttttttttttttaacatcag

SEQ ID NO: 13935 - DNA, 23 bp, Artificial Sequence
  Synthetic
ccgttttttttttttagccgctg

SEQ ID NO: 13936 - DNA, 23 bp, Artificial Sequence
  Synthetic
ccgttttttttttttggcgaagg

SEQ ID NO: 13937 - DNA, 23 bp, Artificial Sequence
  Synthetic
ccgttttttttttttgccgtgac

SEQ ID NO: 13938 - DNA, 23 bp, Artificial Sequence
  Synthetic
ccgttttttttttttgcctgtct

SEQ ID NO: 13939 - DNA, 23 bp, Artificial Sequence
  Synthetic
ccgttttttttttttctgtcaat

SEQ ID NO: 13940 - DNA, 23 bp, Artificial Sequence
  Synthetic
ccgttttttttttttacagttgc

SEQ ID NO: 13941 - DNA, 23 bp, Artificial Sequence
  Synthetic
ccgttttttttttttccaatcag

SEQ ID NO: 13942 - DNA, 23 bp, Artificial Sequence
  Synthetic
ccgttttttttttttcatggtta

SEQ ID NO: 13943 - DNA, 23 bp, Artificial Sequence
  Synthetic
ccgttttttttttttgaattgcg

SEQ ID NO: 13944 - DNA, 23 bp, Artificial Sequence
  Synthetic
ccgttttttttttttcagttctt

SEQ ID NO: 13945 - DNA, 23 bp, Artificial Sequence
  Synthetic
ccgttttttttttttaagtgtca

SEQ ID NO: 13946 - DNA, 23 bp, Artificial Sequence
  Synthetic
ccgttttttttttttaaacccag

SEQ ID NO: 13947 - DNA, 23 bp, Artificial Sequence
  Synthetic
ccgttttttttttttagacccag

SEQ ID NO: 13948 - DNA, 23 bp, Artificial Sequence
  Synthetic
ccgttttttttttttgggtattt

SEQ ID NO: 13949 - DNA, 23 bp, Artificial Sequence
  Synthetic
ccgttttttttttttaacggaac

SEQ ID NO: 13950 - DNA, 23 bp, Artificial Sequence
  Synthetic
ccgttttttttttttgaaatccc

SEQ ID NO: 13951 - DNA, 23 bp, Artificial Sequence
  Synthetic
ccgttttttttttttgtaatccc

SEQ ID NO: 13952 - DNA, 23 bp, Artificial Sequence
  Synthetic
ccgttttttttttttgttcctgc

SEQ ID NO: 13953 - DNA, 23 bp, Artificial Sequence
  Synthetic
ccgttttttttttttagaccgag

SEQ ID NO: 13954 - DNA, 23 bp, Artificial Sequence
  Synthetic
ccgttttttttttttcctatcct

SEQ ID NO: 13955 - DNA, 23 bp, Artificial Sequence
  Synthetic
ccgttttttttttttacctatcc

SEQ ID NO: 13956 - DNA, 23 bp, Artificial Sequence
  Synthetic
ccgttttttttttttcggaactt

SEQ ID NO: 13957 - DNA, 23 bp, Artificial Sequence
  Synthetic
ccgttttttttttttcagaactt

SEQ ID NO: 13958 - DNA, 23 bp, Artificial Sequence
  Synthetic
ccgttttttttttttcaatagac

SEQ ID NO: 13959 - DNA, 23 bp, Artificial Sequence
  Synthetic
ccgttttttttttttcaggattg

SEQ ID NO: 13960 - DNA, 23 bp, Artificial Sequence
  Synthetic
ccgttttttttttttagcggttt

SEQ ID NO: 13961 - DNA, 23 bp, Artificial Sequence
  Synthetic
ccgttttttttttttgtatgtgg

SEQ ID NO: 13962 - DNA, 23 bp, Artificial Sequence
  Synthetic
ccgttttttttttttaccgattt

SEQ ID NO: 13963 - DNA, 23 bp, Artificial Sequence
  Synthetic
ccgttttttttttttacactgat

SEQ ID NO: 13964 - DNA, 23 bp, Artificial Sequence
  Synthetic
ccgttttttttttttccgatttc

SEQ ID NO: 13965 - DNA, 23 bp, Artificial Sequence
  Synthetic
ccgttttttttttttctttgaca

SEQ ID NO: 13966 - DNA, 23 bp, Artificial Sequence
  Synthetic
ccgttttttttttttaccaaaac

SEQ ID NO: 13967 - DNA, 23 bp, Artificial Sequence
  Synthetic
ccgttttttttttttaagcaagt

SEQ ID NO: 13968 - DNA, 23 bp, Artificial Sequence
  Synthetic
ccgttttttttttttactaaaac

SEQ ID NO: 13969 - DNA, 23 bp, Artificial Sequence
  Synthetic
ccgttttttttttttgaaagcac

SEQ ID NO: 13970 - DNA, 23 bp, Artificial Sequence
  Synthetic
ccgttttttttttttcactgaaa

SEQ ID NO: 13971 - DNA, 23 bp, Artificial Sequence
  Synthetic
ccgttttttttttttagcaggta

SEQ ID NO: 13972 - DNA, 23 bp, Artificial Sequence
  Synthetic
ccgttttttttttttcactcaaa

SEQ ID NO: 13973 - DNA, 23 bp, Artificial Sequence
  Synthetic
ccgttttttttttttctgcaaac

SEQ ID NO: 13974 - DNA, 23 bp, Artificial Sequence
  Synthetic
ccgttttttttttttccagtcga

SEQ ID NO: 13975 - DNA, 23 bp, Artificial Sequence
  Synthetic
ccgttttttttttttgctgagtg

SEQ ID NO: 13976 - DNA, 23 bp, Artificial Sequence
  Synthetic
ccgttttttttttttctgagagt

SEQ ID NO: 13977 - DNA, 23 bp, Artificial Sequence
  Synthetic
ccgttttttttttttccagtcgg

SEQ ID NO: 13978 - DNA, 23 bp, Artificial Sequence
  Synthetic
ccgttttttttttttctgtaaac

SEQ ID NO: 13979 - DNA, 23 bp, Artificial Sequence
  Synthetic
ccgttttttttttttcagtcaag

SEQ ID NO: 13980 - DNA, 23 bp, Artificial Sequence
  Synthetic
ccgttttttttttttagctatgc

SEQ ID NO: 13981 - DNA, 23 bp, Artificial Sequence
  Synthetic
ccgttttttttttttcaacttag

SEQ ID NO: 13982 - DNA, 23 bp, Artificial Sequence
  Synthetic
ccgttttttttttttgccctctc

SEQ ID NO: 13983 - DNA, 23 bp, Artificial Sequence
  Synthetic
ccgttttttttttttgaggtcga

SEQ ID NO: 13984 - DNA, 23 bp, Artificial Sequence
  Synthetic
ccgttttttttttttcagcagca

SEQ ID NO: 13985 - DNA, 23 bp, Artificial Sequence
  Synthetic
ccgttttttttttttcaccaatg

SEQ ID NO: 13986 - DNA, 23 bp, Artificial Sequence
  Synthetic
ccgttttttttttttcacttact

SEQ ID NO: 13987 - DNA, 23 bp, Artificial Sequence
  Synthetic
ccgttttttttttttggaggaag

SEQ ID NO: 13988 - DNA, 23 bp, Artificial Sequence
  Synthetic
ccgttttttttttttcggaaggg

SEQ ID NO: 13989 - DNA, 23 bp, Artificial Sequence
  Synthetic
ccgttttttttttttaagaggtt

SEQ ID NO: 13990 - DNA, 23 bp, Artificial Sequence
  Synthetic
ccgttttttttttttaatgcaac

SEQ ID NO: 13991 - DNA, 23 bp, Artificial Sequence
  Synthetic
ccgttttttttttttctgcaggc

SEQ ID NO: 13992 - DNA, 23 bp, Artificial Sequence
  Synthetic
ccgttttttttttttaggatagg

SEQ ID NO: 13993 - DNA, 23 bp, Artificial Sequence
  Synthetic
ccgttttttttttttcatttttc

SEQ ID NO: 13994 - DNA, 23 bp, Artificial Sequence
  Synthetic
ccgttttttttttttaaggcatc

SEQ ID NO: 13995 - DNA, 23 bp, Artificial Sequence
  Synthetic
ccgttttttttttttaacaaaat

SEQ ID NO: 13996 - DNA, 23 bp, Artificial Sequence
  Synthetic
ccgttttttttttttagctcctg

SEQ ID NO: 13997 - DNA, 23 bp, Artificial Sequence
  Synthetic
ccgttttttttttttcaatgcaa

SEQ ID NO: 13998 - DNA, 23 bp, Artificial Sequence
  Synthetic
ccgttttttttttttgctataaa

SEQ ID NO: 13999 - DNA, 23 bp, Artificial Sequence
  Synthetic
ccgttttttttttttacgggtgc

SEQ ID NO: 14000 - DNA, 23 bp, Artificial Sequence
  Synthetic
ccgttttttttttttccctggac

SEQ ID NO: 14001 - DNA, 23 bp, Artificial Sequence
  Synthetic
ccgttttttttttttgaggcagg

SEQ ID NO: 14002 - DNA, 23 bp, Artificial Sequence
  Synthetic
ccgttttttttttttacaaccag

SEQ ID NO: 14003 - DNA, 23 bp, Artificial Sequence
  Synthetic
ccgttttttttttttaatcagct

SEQ ID NO: 14004 - DNA, 23 bp, Artificial Sequence
  Synthetic
ccgttttttttttttcaatcagc

SEQ ID NO: 14005 - DNA, 23 bp, Artificial Sequence
  Synthetic
ccgttttttttttttacccctgg

SEQ ID NO: 14006 - DNA, 23 bp, Artificial Sequence
  Synthetic
ccgttttttttttttctcacacc

SEQ ID NO: 14007 - DNA, 23 bp, Artificial Sequence
  Synthetic
ccgttttttttttttcagatgga

SEQ ID NO: 14008 - DNA, 23 bp, Artificial Sequence
  Synthetic
ccgttttttttttttaattgcat

SEQ ID NO: 14009 - DNA, 23 bp, Artificial Sequence
  Synthetic
ccgttttttttttttaaggattt

SEQ ID NO: 14010 - DNA, 23 bp, Artificial Sequence
  Synthetic
ccgttttttttttttaccattgc

SEQ ID NO: 14011 - DNA, 23 bp, Artificial Sequence
  Synthetic
ccgttttttttttttaacgtgga

SEQ ID NO: 14012 - DNA, 23 bp, Artificial Sequence
  Synthetic
ccgttttttttttttaagatcaa

SEQ ID NO: 14013 - DNA, 23 bp, Artificial Sequence
  Synthetic
ccgttttttttttttcgaatata

SEQ ID NO: 14014 - DNA, 23 bp, Artificial Sequence
  Synthetic
ccgttttttttttttcaggttcc

SEQ ID NO: 14015 - DNA, 23 bp, Artificial Sequence
  Synthetic
ccgttttttttttttcactcaaa

SEQ ID NO: 14016 - DNA, 23 bp, Artificial Sequence
  Synthetic
ccgttttttttttttcgctcaaa

SEQ ID NO: 14017 - DNA, 23 bp, Artificial Sequence
  Synthetic
ccgttttttttttttcaccccaa

SEQ ID NO: 14018 - DNA, 23 bp, Artificial Sequence
  Synthetic
ccgttttttttttttgaaagcgc

SEQ ID NO: 14019 - DNA, 23 bp, Artificial Sequence
  Synthetic
ccgttttttttttttacttatca

SEQ ID NO: 14020 - DNA, 23 bp, Artificial Sequence
  Synthetic
ccgttttttttttttacgcgagc

SEQ ID NO: 14021 - DNA, 23 bp, Artificial Sequence
  Synthetic
ccgttttttttttttcgtggatt

SEQ ID NO: 14022 - DNA, 23 bp, Artificial Sequence
  Synthetic
ccgttttttttttttcatagaag

SEQ ID NO: 14023 - DNA, 23 bp, Artificial Sequence
  Synthetic
ccgttttttttttttacatggat

SEQ ID NO: 14024 - DNA, 23 bp, Artificial Sequence
  Synthetic
ccgttttttttttttcaaaagtt

SEQ ID NO: 14025 - DNA, 23 bp, Artificial Sequence
  Synthetic
ccgttttttttttttcacaggac

SEQ ID NO: 14026 - DNA, 23 bp, Artificial Sequence
  Synthetic
ccgttttttttttttcgttccat

SEQ ID NO: 14027 - DNA, 23 bp, Artificial Sequence
  Synthetic
ccgttttttttttttagatgtgg

SEQ ID NO: 14028 - DNA, 23 bp, Artificial Sequence
  Synthetic
ccgttttttttttttcgcatgtt

SEQ ID NO: 14029 - DNA, 23 bp, Artificial Sequence
  Synthetic
ccgttttttttttttcagagagc

SEQ ID NO: 14030 - DNA, 23 bp, Artificial Sequence
  Synthetic
ccgttttttttttttgaatccac

SEQ ID NO: 14031 - DNA, 23 bp, Artificial Sequence
  Synthetic
ccgttttttttttttgccacaat

SEQ ID NO: 14032 - DNA, 23 bp, Artificial Sequence
  Synthetic
ccgttttttttttttgaacaatt

SEQ ID NO: 14033 - DNA, 23 bp, Artificial Sequence
  Synthetic
ccgttttttttttttggggttca

SEQ ID NO: 14034 - DNA, 23 bp, Artificial Sequence
  Synthetic
ccgttttttttttttcaaagttg

SEQ ID NO: 14035 - DNA, 23 bp, Artificial Sequence
  Synthetic
ccgttttttttttttcaggccat

SEQ ID NO: 14036 - DNA, 23 bp, Artificial Sequence
  Synthetic
ccgttttttttttttgtacgcta

SEQ ID NO: 14037 - DNA, 23 bp, Artificial Sequence
  Synthetic
ccgttttttttttttcggctagt

SEQ ID NO: 14038 - DNA, 23 bp, Artificial Sequence
  Synthetic
ccgttttttttttttcgcccaat

SEQ ID NO: 14039 - DNA, 23 bp, Artificial Sequence
  Synthetic
ccgttttttttttttgccttctg

SEQ ID NO: 14040 - DNA, 23 bp, Artificial Sequence
  Synthetic
ccgttttttttttttgccttctg

SEQ ID NO: 14041 - DNA, 23 bp, Artificial Sequence
  Synthetic
ccgttttttttttttgaggggcc

SEQ ID NO: 14042 - DNA, 23 bp, Artificial Sequence
  Synthetic
ccgttttttttttttaaaacatg

SEQ ID NO: 14043 - DNA, 23 bp, Artificial Sequence
  Synthetic
ccgttttttttttttgcggacac

SEQ ID NO: 14044 - DNA, 23 bp, Artificial Sequence
  Synthetic
ccgttttttttttttaacgggag

SEQ ID NO: 14045 - DNA, 23 bp, Artificial Sequence
  Synthetic
ccgttttttttttttcggtttta

SEQ ID NO: 14046 - DNA, 23 bp, Artificial Sequence
  Synthetic
ccgttttttttttttcatgacgg

SEQ ID NO: 14047 - DNA, 23 bp, Artificial Sequence
  Synthetic
ccgttttttttttttcacccaat

SEQ ID NO: 14048 - DNA, 23 bp, Artificial Sequence
  Synthetic
ccgttttttttttttgacatgga

SEQ ID NO: 14049 - DNA, 23 bp, Artificial Sequence
  Synthetic
ccgttttttttttttcaccgagg

SEQ ID NO: 14050 - DNA, 23 bp, Artificial Sequence
  Synthetic
ccgttttttttttttgggacatc

SEQ ID NO: 14051 - DNA, 23 bp, Artificial Sequence
  Synthetic
ccgttttttttttttccagctaa

SEQ ID NO: 14052 - DNA, 23 bp, Artificial Sequence
  Synthetic
ccgttttttttttttccagctaa

SEQ ID NO: 14053 - DNA, 23 bp, Artificial Sequence
  Synthetic
ccgttttttttttttaggaacac

SEQ ID NO: 14054 - DNA, 23 bp, Artificial Sequence
  Synthetic
ccgttttttttttttaactcagt

SEQ ID NO: 14055 - DNA, 23 bp, Artificial Sequence
  Synthetic
ccgttttttttttttctcagttt

SEQ ID NO: 14056 - DNA, 23 bp, Artificial Sequence
  Synthetic
ccgttttttttttttctttgcag

SEQ ID NO: 14057 - DNA, 23 bp, Artificial Sequence
  Synthetic
ccgttttttttttttgaactcac

SEQ ID NO: 14058 - DNA, 23 bp, Artificial Sequence
  Synthetic
ccgttttttttttttaaccctat

SEQ ID NO: 14059 - DNA, 23 bp, Artificial Sequence
  Synthetic
ccgttttttttttttcagagaca

SEQ ID NO: 14060 - DNA, 23 bp, Artificial Sequence
  Synthetic
ccgttttttttttttgatgtagt

SEQ ID NO: 14061 - DNA, 23 bp, Artificial Sequence
  Synthetic
ccgttttttttttttgaagacgg

SEQ ID NO: 14062 - DNA, 23 bp, Artificial Sequence
  Synthetic
ccgttttttttttttcgggaggg

SEQ ID NO: 14063 - DNA, 23 bp, Artificial Sequence
  Synthetic
ccgttttttttttttgagaggag

SEQ ID NO: 14064 - DNA, 23 bp, Artificial Sequence
  Synthetic
ccgttttttttttttaattcatc

SEQ ID NO: 14065 - DNA, 23 bp, Artificial Sequence
  Synthetic
ccgttttttttttttcggggcag

SEQ ID NO: 14066 - DNA, 23 bp, Artificial Sequence
  Synthetic
ccgttttttttttttactggatg

SEQ ID NO: 14067 - DNA, 23 bp, Artificial Sequence
  Synthetic
ccgttttttttttttagtggatg

SEQ ID NO: 14068 - DNA, 23 bp, Artificial Sequence
  Synthetic
ccgttttttttttttagagtgcc

SEQ ID NO: 14069 - DNA, 23 bp, Artificial Sequence
  Synthetic
ccgttttttttttttctgccgta

SEQ ID NO: 14070 - DNA, 23 bp, Artificial Sequence
  Synthetic
ccgttttttttttttagcatgga

SEQ ID NO: 14071 - DNA, 23 bp, Artificial Sequence
  Synthetic
ccgttttttttttttctcatgga

SEQ ID NO: 14072 - DNA, 23 bp, Artificial Sequence
  Synthetic
ccgttttttttttttagaatctt

SEQ ID NO: 14073 - DNA, 23 bp, Artificial Sequence
  Synthetic
ccgttttttttttttggcacaca

SEQ ID NO: 14074 - DNA, 23 bp, Artificial Sequence
  Synthetic
ccgttttttttttttatgaaagc

SEQ ID NO: 14075 - DNA, 23 bp, Artificial Sequence
  Synthetic
ccgttttttttttttagaggttt

SEQ ID NO: 14076 - DNA, 23 bp, Artificial Sequence
  Synthetic
ccgttttttttttttaagaagtg

SEQ ID NO: 14077 - DNA, 23 bp, Artificial Sequence
  Synthetic
ccgttttttttttttagattggc

SEQ ID NO: 14078 - DNA, 23 bp, Artificial Sequence
  Synthetic
ccgttttttttttttcaaaccac

SEQ ID NO: 14079 - DNA, 23 bp, Artificial Sequence
  Synthetic
ccgttttttttttttaaaaacgc

SEQ ID NO: 14080 - DNA, 23 bp, Artificial Sequence
  Synthetic
ccgttttttttttttaacatcac

SEQ ID NO: 14081 - DNA, 23 bp, Artificial Sequence
  Synthetic
ccgttttttttttttagaatcct

SEQ ID NO: 14082 - DNA, 23 bp, Artificial Sequence
  Synthetic
ccgttttttttttttcacccagg

SEQ ID NO: 14083 - DNA, 23 bp, Artificial Sequence
  Synthetic
ccgttttttttttttgcacccag

SEQ ID NO: 14084 - DNA, 23 bp, Artificial Sequence
  Synthetic
ccgttttttttttttgcagaact

SEQ ID NO: 14085 - DNA, 23 bp, Artificial Sequence
  Synthetic
ccgttttttttttttagagtgca

SEQ ID NO: 14086 - DNA, 23 bp, Artificial Sequence
  Synthetic
ccgttttttttttttaggaaacc

SEQ ID NO: 14087 - DNA, 23 bp, Artificial Sequence
  Synthetic
ccgttttttttttttactcagaa

SEQ ID NO: 14088 - DNA, 23 bp, Artificial Sequence
  Synthetic
ccgttttttttttttactccaaa

SEQ ID NO: 14089 - DNA, 23 bp, Artificial Sequence
  Synthetic
ccgttttttttttttactccaaa

SEQ ID NO: 14090 - DNA, 23 bp, Artificial Sequence
  Synthetic
ccgttttttttttttacccacag

SEQ ID NO: 14091 - DNA, 23 bp, Artificial Sequence
  Synthetic
ccgttttttttttttgattgcca

SEQ ID NO: 14092 - DNA, 23 bp, Artificial Sequence
  Synthetic
ccgttttttttttttactgcaga

SEQ ID NO: 14093 - DNA, 23 bp, Artificial Sequence
  Synthetic
ccgttttttttttttacctcagc

SEQ ID NO: 14094 - DNA, 23 bp, Artificial Sequence
  Synthetic
ccgttttttttttttaaagtgcc

SEQ ID NO: 14095 - DNA, 23 bp, Artificial Sequence
  Synthetic
ccgttttttttttttaaatgaca

SEQ ID NO: 14096 - DNA, 23 bp, Artificial Sequence
  Synthetic
ccgttttttttttttactcacag

SEQ ID NO: 14097 - DNA, 23 bp, Artificial Sequence
  Synthetic
ccgttttttttttttcgctccaa

SEQ ID NO: 14098 - DNA, 23 bp, Artificial Sequence
  Synthetic
ccgttttttttttttagaaagtg

SEQ ID NO: 14099 - DNA, 23 bp, Artificial Sequence
  Synthetic
ccgttttttttttttccctctga

SEQ ID NO: 14100 - DNA, 23 bp, Artificial Sequence
  Synthetic
ccgttttttttttttaagtgctt

SEQ ID NO: 14101 - DNA, 23 bp, Artificial Sequence
  Synthetic
ccgttttttttttttgacagtgc

SEQ ID NO: 14102 - DNA, 23 bp, Artificial Sequence
  Synthetic
ccgttttttttttttacactcta

SEQ ID NO: 14103 - DNA, 23 bp, Artificial Sequence
  Synthetic
ccgttttttttttttacactcta

SEQ ID NO: 14104 - DNA, 23 bp, Artificial Sequence
  Synthetic
ccgttttttttttttcactctaa

SEQ ID NO: 14105 - DNA, 23 bp, Artificial Sequence
  Synthetic
ccgttttttttttttcagcaaag

SEQ ID NO: 14106 - DNA, 23 bp, Artificial Sequence
  Synthetic
ccgttttttttttttcctctaaa

SEQ ID NO: 14107 - DNA, 23 bp, Artificial Sequence
  Synthetic
ccgttttttttttttactctaaa

SEQ ID NO: 14108 - DNA, 23 bp, Artificial Sequence
  Synthetic
ccgttttttttttttagaaagtg

SEQ ID NO: 14109 - DNA, 23 bp, Artificial Sequence
  Synthetic
ccgttttttttttttctccaaag

SEQ ID NO: 14110 - DNA, 23 bp, Artificial Sequence
  Synthetic
ccgttttttttttttcactctga

SEQ ID NO: 14111 - DNA, 23 bp, Artificial Sequence
  Synthetic
ccgttttttttttttctctaaag

SEQ ID NO: 14112 - DNA, 23 bp, Artificial Sequence
  Synthetic
ccgttttttttttttgagaaagt

SEQ ID NO: 14113 - DNA, 23 bp, Artificial Sequence
  Synthetic
ccgttttttttttttaacactct

SEQ ID NO: 14114 - DNA, 23 bp, Artificial Sequence
  Synthetic
ccgttttttttttttaacctcta

SEQ ID NO: 14115 - DNA, 23 bp, Artificial Sequence
  Synthetic
ccgttttttttttttcctctaaa

SEQ ID NO: 14116 - DNA, 23 bp, Artificial Sequence
  Synthetic
ccgttttttttttttcactctaa

SEQ ID NO: 14117 - DNA, 23 bp, Artificial Sequence
  Synthetic
ccgttttttttttttcactctaa

SEQ ID NO: 14118 - DNA, 23 bp, Artificial Sequence
  Synthetic
ccgttttttttttttaaagtgct

SEQ ID NO: 14119 - DNA, 23 bp, Artificial Sequence
  Synthetic
ccgttttttttttttcagtccaa

SEQ ID NO: 14120 - DNA, 23 bp, Artificial Sequence
  Synthetic
ccgttttttttttttgaaagtac

SEQ ID NO: 14121 - DNA, 23 bp, Artificial Sequence
  Synthetic
ccgttttttttttttcctctaaa

SEQ ID NO: 14122 - DNA, 23 bp, Artificial Sequence
  Synthetic
ccgttttttttttttaccctcta

SEQ ID NO: 14123 - DNA, 23 bp, Artificial Sequence
  Synthetic
ccgttttttttttttacccacca

SEQ ID NO: 14124 - DNA, 23 bp, Artificial Sequence
  Synthetic
ccgttttttttttttagaaaggg

SEQ ID NO: 14125 - DNA, 23 bp, Artificial Sequence
  Synthetic
ccgttttttttttttcctcaaaa

SEQ ID NO: 14126 - DNA, 23 bp, Artificial Sequence
  Synthetic
ccgttttttttttttaccctcta

SEQ ID NO: 14127 - DNA, 23 bp, Artificial Sequence
  Synthetic
ccgttttttttttttcactctaa

SEQ ID NO: 14128 - DNA, 23 bp, Artificial Sequence
  Synthetic
ccgttttttttttttctctaaag

SEQ ID NO: 14129 - DNA, 23 bp, Artificial Sequence
  Synthetic
ccgttttttttttttcactctaa

SEQ ID NO: 14130 - DNA, 23 bp, Artificial Sequence
  Synthetic
ccgttttttttttttacactcta

SEQ ID NO: 14131 - DNA, 23 bp, Artificial Sequence
  Synthetic
ccgttttttttttttcctctata

SEQ ID NO: 14132 - DNA, 23 bp, Artificial Sequence
  Synthetic
ccgttttttttttttctccaaag

SEQ ID NO: 14133 - DNA, 23 bp, Artificial Sequence
  Synthetic
ccgttttttttttttagaaagtg

SEQ ID NO: 14134 - DNA, 23 bp, Artificial Sequence
  Synthetic
ccgttttttttttttgaaagtgc

SEQ ID NO: 14135 - DNA, 23 bp, Artificial Sequence
  Synthetic
ccgttttttttttttctctaaag

SEQ ID NO: 14136 - DNA, 23 bp, Artificial Sequence
  Synthetic
ccgttttttttttttgaaagtgc

SEQ ID NO: 14137 - DNA, 23 bp, Artificial Sequence
  Synthetic
ccgttttttttttttacagaaag

SEQ ID NO: 14138 - DNA, 23 bp, Artificial Sequence
  Synthetic
ccgttttttttttttcctctaaa

SEQ ID NO: 14139 - DNA, 23 bp, Artificial Sequence
  Synthetic
ccgttttttttttttacagaaag

SEQ ID NO: 14140 - DNA, 23 bp, Artificial Sequence
  Synthetic
ccgttttttttttttgaaagggc

SEQ ID NO: 14141 - DNA, 23 bp, Artificial Sequence
  Synthetic
ccgttttttttttttcggtccta

SEQ ID NO: 14142 - DNA, 23 bp, Artificial Sequence
  Synthetic
ccgttttttttttttcacaccaa

SEQ ID NO: 14143 - DNA, 23 bp, Artificial Sequence
  Synthetic
ccgttttttttttttagttatca

SEQ ID NO: 14144 - DNA, 23 bp, Artificial Sequence
  Synthetic
ccgttttttttttttcgtgacat

SEQ ID NO: 14145 - DNA, 23 bp, Artificial Sequence
  Synthetic
ccgttttttttttttcttgctaa

SEQ ID NO: 14146 - DNA, 23 bp, Artificial Sequence
  Synthetic
ccgttttttttttttacacaata

SEQ ID NO: 14147 - DNA, 23 bp, Artificial Sequence
  Synthetic
ccgttttttttttttcaaaagta

SEQ ID NO: 14148 - DNA, 23 bp, Artificial Sequence
  Synthetic
ccgttttttttttttcaaaagca

SEQ ID NO: 14149 - DNA, 23 bp, Artificial Sequence
  Synthetic
ccgttttttttttttcaaaagta

SEQ ID NO: 14150 - DNA, 23 bp, Artificial Sequence
  Synthetic
ccgttttttttttttcaaaagaa

SEQ ID NO: 14151 - DNA, 23 bp, Artificial Sequence
  Synthetic
ccgttttttttttttgagctcat

SEQ ID NO: 14152 - DNA, 23 bp, Artificial Sequence
  Synthetic
ccgttttttttttttgtgcctga

SEQ ID NO: 14153 - DNA, 23 bp, Artificial Sequence
  Synthetic
ccgttttttttttttgaaaccaa

SEQ ID NO: 14154 - DNA, 23 bp, Artificial Sequence
  Synthetic
ccgttttttttttttgaaaccaa

SEQ ID NO: 14155 - DNA, 23 bp, Artificial Sequence
  Synthetic
ccgttttttttttttctaaccag

SEQ ID NO: 14156 - DNA, 23 bp, Artificial Sequence
  Synthetic
ccgttttttttttttaaacaaaa

SEQ ID NO: 14157 - DNA, 23 bp, Artificial Sequence
  Synthetic
ccgttttttttttttctggctga

SEQ ID NO: 14158 - DNA, 23 bp, Artificial Sequence
  Synthetic
ccgttttttttttttcagaggtt

SEQ ID NO: 14159 - DNA, 23 bp, Artificial Sequence
  Synthetic
ccgttttttttttttatattaca

SEQ ID NO: 14160 - DNA, 23 bp, Artificial Sequence
  Synthetic
ccgttttttttttttgacaaggc

SEQ ID NO: 14161 - DNA, 23 bp, Artificial Sequence
  Synthetic
ccgttttttttttttggtacagc

SEQ ID NO: 14162 - DNA, 23 bp, Artificial Sequence
  Synthetic
ccgttttttttttttgtgcatat

SEQ ID NO: 14163 - DNA, 23 bp, Artificial Sequence
  Synthetic
ccgttttttttttttgcggccgg

SEQ ID NO: 14164 - DNA, 23 bp, Artificial Sequence
  Synthetic
ccgttttttttttttcttcaagg

SEQ ID NO: 14165 - DNA, 23 bp, Artificial Sequence
  Synthetic
ccgttttttttttttcaaatggt

SEQ ID NO: 14166 - DNA, 23 bp, Artificial Sequence
  Synthetic
ccgttttttttttttggaaacgt

SEQ ID NO: 14167 - DNA, 23 bp, Artificial Sequence
  Synthetic
ccgttttttttttttcctgctga

SEQ ID NO: 14168 - DNA, 23 bp, Artificial Sequence
  Synthetic
ccgttttttttttttaacagaca

SEQ ID NO: 14169 - DNA, 23 bp, Artificial Sequence
  Synthetic
ccgttttttttttttgggatcac

SEQ ID NO: 14170 - DNA, 23 bp, Artificial Sequence
  Synthetic
ccgttttttttttttctgtcctg

SEQ ID NO: 14171 - DNA, 23 bp, Artificial Sequence
  Synthetic
ccgttttttttttttgtgtatac

SEQ ID NO: 14172 - DNA, 23 bp, Artificial Sequence
  Synthetic
ccgttttttttttttctttccag

SEQ ID NO: 14173 - DNA, 23 bp, Artificial Sequence
  Synthetic
ccgttttttttttttcaaaggta

SEQ ID NO: 14174 - DNA, 23 bp, Artificial Sequence
  Synthetic
ccgttttttttttttcactcaga

SEQ ID NO: 14175 - DNA, 23 bp, Artificial Sequence
  Synthetic
ccgttttttttttttggccaccg

SEQ ID NO: 14176 - DNA, 23 bp, Artificial Sequence
  Synthetic
ccgttttttttttttgatcagtt

SEQ ID NO: 14177 - DNA, 23 bp, Artificial Sequence
  Synthetic
ccgttttttttttttgggtgtgt

SEQ ID NO: 14178 - DNA, 23 bp, Artificial Sequence
  Synthetic
ccgttttttttttttctcctgtc

SEQ ID NO: 14179 - DNA, 23 bp, Artificial Sequence
  Synthetic
ccgttttttttttttaaagacgt

SEQ ID NO: 14180 - DNA, 23 bp, Artificial Sequence
  Synthetic
ccgttttttttttttaggtacca

SEQ ID NO: 14181 - DNA, 23 bp, Artificial Sequence
  Synthetic
ccgttttttttttttcaatccta

SEQ ID NO: 14182 - DNA, 23 bp, Artificial Sequence
  Synthetic
ccgttttttttttttcgcggttt

SEQ ID NO: 14183 - DNA, 23 bp, Artificial Sequence
  Synthetic
ccgttttttttttttctaatgat

SEQ ID NO: 14184 - DNA, 23 bp, Artificial Sequence
  Synthetic
ccgttttttttttttctgatcta

SEQ ID NO: 14185 - DNA, 23 bp, Artificial Sequence
  Synthetic
ccgttttttttttttgtaactgg

SEQ ID NO: 14186 - DNA, 23 bp, Artificial Sequence
  Synthetic
ccgttttttttttttaatgggac

SEQ ID NO: 14187 - DNA, 23 bp, Artificial Sequence
  Synthetic
ccgttttttttttttcagtccca

SEQ ID NO: 14188 - DNA, 23 bp, Artificial Sequence
  Synthetic
ccgttttttttttttgcatacag

SEQ ID NO: 14189 - DNA, 23 bp, Artificial Sequence
  Synthetic
ccgttttttttttttgacctaaa

SEQ ID NO: 14190 - DNA, 23 bp, Artificial Sequence
  Synthetic
ccgttttttttttttgactcatc

SEQ ID NO: 14191 - DNA, 23 bp, Artificial Sequence
  Synthetic
ccgttttttttttttctaaccca

SEQ ID NO: 14192 - DNA, 23 bp, Artificial Sequence
  Synthetic
ccgttttttttttttgggaaccg

SEQ ID NO: 14193 - DNA, 23 bp, Artificial Sequence
  Synthetic
ccgttttttttttttgcactttt

SEQ ID NO: 14194 - DNA, 23 bp, Artificial Sequence
  Synthetic
ccgttttttttttttcaatgaga

SEQ ID NO: 14195 - DNA, 23 bp, Artificial Sequence
  Synthetic
ccgttttttttttttcatcatcg

SEQ ID NO: 14196 - DNA, 23 bp, Artificial Sequence
  Synthetic
ccgttttttttttttctgagcaa

SEQ ID NO: 14197 - DNA, 23 bp, Artificial Sequence
  Synthetic
ccgttttttttttttaagtcaca

SEQ ID NO: 14198 - DNA, 23 bp, Artificial Sequence
  Synthetic
ccgttttttttttttgacacacc

SEQ ID NO: 14199 - DNA, 23 bp, Artificial Sequence
  Synthetic
ccgttttttttttttccgaggag

SEQ ID NO: 14200 - DNA, 23 bp, Artificial Sequence
  Synthetic
ccgttttttttttttcagtggtc

SEQ ID NO: 14201 - DNA, 23 bp, Artificial Sequence
  Synthetic
ccgttttttttttttacgatgac

SEQ ID NO: 14202 - DNA, 23 bp, Artificial Sequence
  Synthetic
ccgttttttttttttgataaact

SEQ ID NO: 14203 - DNA, 23 bp, Artificial Sequence
  Synthetic
ccgttttttttttttagcaaggc

SEQ ID NO: 14204 - DNA, 23 bp, Artificial Sequence
  Synthetic
ccgttttttttttttcctccaac

SEQ ID NO: 14205 - DNA, 23 bp, Artificial Sequence
  Synthetic
ccgttttttttttttggccgcag

SEQ ID NO: 14206 - DNA, 23 bp, Artificial Sequence
  Synthetic
ccgttttttttttttcaaaagta

SEQ ID NO: 14207 - DNA, 23 bp, Artificial Sequence
  Synthetic
ccgttttttttttttcctgaatt

SEQ ID NO: 14208 - DNA, 23 bp, Artificial Sequence
  Synthetic
ccgttttttttttttggagaagg

SEQ ID NO: 14209 - DNA, 23 bp, Artificial Sequence
  Synthetic
ccgttttttttttttctttgatt

SEQ ID NO: 14210 - DNA, 23 bp, Artificial Sequence
  Synthetic
ccgttttttttttttatagatct

SEQ ID NO: 14211 - DNA, 23 bp, Artificial Sequence
  Synthetic
ccgttttttttttttcggagctg

SEQ ID NO: 14212 - DNA, 23 bp, Artificial Sequence
  Synthetic
ccgttttttttttttgagatgag

SEQ ID NO: 14213 - DNA, 23 bp, Artificial Sequence
  Synthetic
ccgttttttttttttccagcaca

SEQ ID NO: 14214 - DNA, 23 bp, Artificial Sequence
  Synthetic
ccgttttttttttttcagacccc

SEQ ID NO: 14215 - DNA, 23 bp, Artificial Sequence
  Synthetic
ccgttttttttttttaggagctc

SEQ ID NO: 14216 - DNA, 23 bp, Artificial Sequence
  Synthetic
ccgttttttttttttgcaaagaa

SEQ ID NO: 14217 - DNA, 23 bp, Artificial Sequence
  Synthetic
ccgttttttttttttcacctggc

SEQ ID NO: 14218 - DNA, 23 bp, Artificial Sequence
  Synthetic
ccgttttttttttttgagggaga

SEQ ID NO: 14219 - DNA, 23 bp, Artificial Sequence
  Synthetic
ccgttttttttttttagtcactg

SEQ ID NO: 14220 - DNA, 23 bp, Artificial Sequence
  Synthetic
ccgttttttttttttccaccttc

SEQ ID NO: 14221 - DNA, 23 bp, Artificial Sequence
  Synthetic
ccgttttttttttttctcagaag

SEQ ID NO: 14222 - DNA, 23 bp, Artificial Sequence
  Synthetic
ccgttttttttttttctgggcac

SEQ ID NO: 14223 - DNA, 23 bp, Artificial Sequence
  Synthetic
ccgttttttttttttctatatct

SEQ ID NO: 14224 - DNA, 23 bp, Artificial Sequence
  Synthetic
ccgttttttttttttggtaagcg

SEQ ID NO: 14225 - DNA, 23 bp, Artificial Sequence
  Synthetic
ccgttttttttttttctccaacc

SEQ ID NO: 14226 - DNA, 23 bp, Artificial Sequence
  Synthetic
ccgttttttttttttcccaacag

SEQ ID NO: 14227 - DNA, 23 bp, Artificial Sequence
  Synthetic
ccgttttttttttttaacacaag

SEQ ID NO: 14228 - DNA, 23 bp, Artificial Sequence
  Synthetic
ccgttttttttttttggactata

SEQ ID NO: 14229 - DNA, 23 bp, Artificial Sequence
  Synthetic
ccgttttttttttttagacattt

SEQ ID NO: 14230 - DNA, 23 bp, Artificial Sequence
  Synthetic
ccgttttttttttttctcttttc

SEQ ID NO: 14231 - DNA, 23 bp, Artificial Sequence
  Synthetic
ccgttttttttttttgactgcca

SEQ ID NO: 14232 - DNA, 23 bp, Artificial Sequence
  Synthetic
ccgttttttttttttctgggctt

SEQ ID NO: 14233 - DNA, 23 bp, Artificial Sequence
  Synthetic
ccgttttttttttttccttccct

SEQ ID NO: 14234 - DNA, 23 bp, Artificial Sequence
  Synthetic
ccgttttttttttttctgaggtc

SEQ ID NO: 14235 - DNA, 23 bp, Artificial Sequence
  Synthetic
ccgttttttttttttccacagga

SEQ ID NO: 14236 - DNA, 23 bp, Artificial Sequence
  Synthetic
ccgttttttttttttgtggtaga

SEQ ID NO: 14237 - DNA, 23 bp, Artificial Sequence
  Synthetic
ccgttttttttttttccaaagtt

SEQ ID NO: 14238 - DNA, 23 bp, Artificial Sequence
  Synthetic
ccgttttttttttttgacattgt

SEQ ID NO: 14239 - DNA, 23 bp, Artificial Sequence
  Synthetic
ccgttttttttttttgcgggcgg

SEQ ID NO: 14240 - DNA, 23 bp, Artificial Sequence
  Synthetic
ccgttttttttttttcgcagagc

SEQ ID NO: 14241 - DNA, 23 bp, Artificial Sequence
  Synthetic
ccgttttttttttttggccgcca

SEQ ID NO: 14242 - DNA, 23 bp, Artificial Sequence
  Synthetic
ccgttttttttttttcagcgctc

SEQ ID NO: 14243 - DNA, 23 bp, Artificial Sequence
  Synthetic
ccgttttttttttttgaggcagg

SEQ ID NO: 14244 - DNA, 23 bp, Artificial Sequence
  Synthetic
ccgttttttttttttaggtgact

SEQ ID NO: 14245 - DNA, 23 bp, Artificial Sequence
  Synthetic
ccgttttttttttttaagacaca

SEQ ID NO: 14246 - DNA, 23 bp, Artificial Sequence
  Synthetic
ccgttttttttttttacctgagc

SEQ ID NO: 14247 - DNA, 23 bp, Artificial Sequence
  Synthetic
ccgttttttttttttctctaaga

SEQ ID NO: 14248 - DNA, 23 bp, Artificial Sequence
  Synthetic
ccgttttttttttttagcagtac

SEQ ID NO: 14249 - DNA, 23 bp, Artificial Sequence
  Synthetic
ccgttttttttttttcctcagag

SEQ ID NO: 14250 - DNA, 23 bp, Artificial Sequence
  Synthetic
ccgttttttttttttaaggaagt

SEQ ID NO: 14251 - DNA, 23 bp, Artificial Sequence
  Synthetic
ccgttttttttttttccagtgcc

SEQ ID NO: 14252 - DNA, 23 bp, Artificial Sequence
  Synthetic
ccgttttttttttttactcttga

SEQ ID NO: 14253 - DNA, 23 bp, Artificial Sequence
  Synthetic
ccgttttttttttttcctgagag

SEQ ID NO: 14254 - DNA, 23 bp, Artificial Sequence
  Synthetic
ccgttttttttttttaaaagtca

SEQ ID NO: 14255 - DNA, 23 bp, Artificial Sequence
  Synthetic
ccgttttttttttttcacaaccc

SEQ ID NO: 14256 - DNA, 23 bp, Artificial Sequence
  Synthetic
ccgttttttttttttcagtagag

SEQ ID NO: 14257 - DNA, 23 bp, Artificial Sequence
  Synthetic
ccgttttttttttttcacatgtt

SEQ ID NO: 14258 - DNA, 23 bp, Artificial Sequence
  Synthetic
ccgttttttttttttaagaggtt

SEQ ID NO: 14259 - DNA, 23 bp, Artificial Sequence
  Synthetic
ccgttttttttttttgaggttga

SEQ ID NO: 14260 - DNA, 23 bp, Artificial Sequence
  Synthetic
ccgttttttttttttctagagag

SEQ ID NO: 14261 - DNA, 23 bp, Artificial Sequence
  Synthetic
ccgttttttttttttccaacgga

SEQ ID NO: 14262 - DNA, 23 bp, Artificial Sequence
  Synthetic
ccgttttttttttttgggaccct

SEQ ID NO: 14263 - DNA, 23 bp, Artificial Sequence
  Synthetic
ccgttttttttttttaactccga

SEQ ID NO: 14264 - DNA, 23 bp, Artificial Sequence
  Synthetic
ccgttttttttttttcgcgcagg

SEQ ID NO: 14265 - DNA, 23 bp, Artificial Sequence
  Synthetic
ccgttttttttttttgctgggcc

SEQ ID NO: 14266 - DNA, 23 bp, Artificial Sequence
  Synthetic
ccgttttttttttttcggtcccg

SEQ ID NO: 14267 - DNA, 23 bp, Artificial Sequence
  Synthetic
ccgttttttttttttagtgggcc

SEQ ID NO: 14268 - DNA, 23 bp, Artificial Sequence
  Synthetic
ccgttttttttttttcctccagc

SEQ ID NO: 14269 - DNA, 23 bp, Artificial Sequence
  Synthetic
ccgttttttttttttaacaaaat

SEQ ID NO: 14270 - DNA, 23 bp, Artificial Sequence
  Synthetic
ccgttttttttttttgttagtgg

SEQ ID NO: 14271 - DNA, 23 bp, Artificial Sequence
  Synthetic
ccgttttttttttttatcacctt

SEQ ID NO: 14272 - DNA, 23 bp, Artificial Sequence
  Synthetic
ccgttttttttttttctgaggct

SEQ ID NO: 14273 - DNA, 23 bp, Artificial Sequence
  Synthetic
ccgttttttttttttgaaaccat

SEQ ID NO: 14274 - DNA, 23 bp, Artificial Sequence
  Synthetic
ccgttttttttttttatgctcag

SEQ ID NO: 14275 - DNA, 23 bp, Artificial Sequence
  Synthetic
ccgttttttttttttcagcagtt

SEQ ID NO: 14276 - DNA, 23 bp, Artificial Sequence
  Synthetic
ccgttttttttttttcactccgt

SEQ ID NO: 14277 - DNA, 23 bp, Artificial Sequence
  Synthetic
ccgttttttttttttaccaagac

SEQ ID NO: 14278 - DNA, 23 bp, Artificial Sequence
  Synthetic
ccgttttttttttttgctcagaa

SEQ ID NO: 14279 - DNA, 23 bp, Artificial Sequence
  Synthetic
ccgttttttttttttgccctgac

SEQ ID NO: 14280 - DNA, 23 bp, Artificial Sequence
  Synthetic
ccgttttttttttttcgattccg

SEQ ID NO: 14281 - DNA, 23 bp, Artificial Sequence
  Synthetic
ccgttttttttttttcaaggatg

SEQ ID NO: 14282 - DNA, 23 bp, Artificial Sequence
  Synthetic
ccgttttttttttttatacagct

SEQ ID NO: 14283 - DNA, 23 bp, Artificial Sequence
  Synthetic
ccgttttttttttttctttcggt

SEQ ID NO: 14284 - DNA, 23 bp, Artificial Sequence
  Synthetic
ccgttttttttttttaggccggg

SEQ ID NO: 14285 - DNA, 23 bp, Artificial Sequence
  Synthetic
ccgttttttttttttaggccggg

SEQ ID NO: 14286 - DNA, 23 bp, Artificial Sequence
  Synthetic
ccgttttttttttttacctgcac

SEQ ID NO: 14287 - DNA, 23 bp, Artificial Sequence
  Synthetic
ccgttttttttttttctcaataa

SEQ ID NO: 14288 - DNA, 23 bp, Artificial Sequence
  Synthetic
ccgttttttttttttcaaaaatg

SEQ ID NO: 14289 - DNA, 23 bp, Artificial Sequence
  Synthetic
ccgttttttttttttacaataca

SEQ ID NO: 14290 - DNA, 23 bp, Artificial Sequence
  Synthetic
ccgttttttttttttacaagatc

SEQ ID NO: 14291 - DNA, 23 bp, Artificial Sequence
  Synthetic
ccgttttttttttttgcaaggtc

SEQ ID NO: 14292 - DNA, 23 bp, Artificial Sequence
  Synthetic
ccgttttttttttttccacttcc

SEQ ID NO: 14293 - DNA, 23 bp, Artificial Sequence
  Synthetic
ccgttttttttttttcttacacc

SEQ ID NO: 14294 - DNA, 23 bp, Artificial Sequence
  Synthetic
ccgttttttttttttccactcgg

SEQ ID NO: 14295 - DNA, 23 bp, Artificial Sequence
  Synthetic
ccgttttttttttttccactcgg

SEQ ID NO: 14296 - DNA, 23 bp, Artificial Sequence
  Synthetic
ccgttttttttttttggacacag

SEQ ID NO: 14297 - DNA, 23 bp, Artificial Sequence
  Synthetic
ccgttttttttttttggagagga

SEQ ID NO: 14298 - DNA, 23 bp, Artificial Sequence
  Synthetic
ccgttttttttttttagatcgac

SEQ ID NO: 14299 - DNA, 23 bp, Artificial Sequence
  Synthetic
ccgttttttttttttgctgccgt

SEQ ID NO: 14300 - DNA, 23 bp, Artificial Sequence
  Synthetic
ccgttttttttttttcacattct

SEQ ID NO: 14301 - DNA, 23 bp, Artificial Sequence
  Synthetic
ccgttttttttttttagctaggc

SEQ ID NO: 14302 - DNA, 23 bp, Artificial Sequence
  Synthetic
ccgttttttttttttctagagta

SEQ ID NO: 14303 - DNA, 23 bp, Artificial Sequence
  Synthetic
ccgttttttttttttcggcaagt

SEQ ID NO: 14304 - DNA, 23 bp, Artificial Sequence
  Synthetic
ccgttttttttttttcaacagcc

SEQ ID NO: 14305 - DNA, 23 bp, Artificial Sequence
  Synthetic
ccgttttttttttttcgatggat

SEQ ID NO: 14306 - DNA, 23 bp, Artificial Sequence
  Synthetic
ccgttttttttttttgcgccagc

SEQ ID NO: 14307 - DNA, 23 bp, Artificial Sequence
  Synthetic
ccgttttttttttttgtgctctc

SEQ ID NO: 14308 - DNA, 23 bp, Artificial Sequence
  Synthetic
ccgttttttttttttcgcagctg

SEQ ID NO: 14309 - DNA, 23 bp, Artificial Sequence
  Synthetic
ccgttttttttttttgcggggtt

SEQ ID NO: 14310 - DNA, 23 bp, Artificial Sequence
  Synthetic
ccgttttttttttttacaagtta

SEQ ID NO: 14311 - DNA, 23 bp, Artificial Sequence
  Synthetic
ccgttttttttttttacaaacca

SEQ ID NO: 14312 - DNA, 23 bp, Artificial Sequence
  Synthetic
ccgttttttttttttaccaatat

SEQ ID NO: 14313 - DNA, 23 bp, Artificial Sequence
  Synthetic
ccgttttttttttttcaagtgcc

SEQ ID NO: 14314 - DNA, 23 bp, Artificial Sequence
  Synthetic
ccgttttttttttttctacctgc

SEQ ID NO: 14315 - DNA, 23 bp, Artificial Sequence
  Synthetic
ccgttttttttttttctgcacta

SEQ ID NO: 14316 - DNA, 23 bp, Artificial Sequence
  Synthetic
ccgttttttttttttagttttgc

SEQ ID NO: 14317 - DNA, 23 bp, Artificial Sequence
  Synthetic
ccgttttttttttttagttttgc

SEQ ID NO: 14318 - DNA, 23 bp, Artificial Sequence
  Synthetic
ccgttttttttttttcctgcact

SEQ ID NO: 14319 - DNA, 23 bp, Artificial Sequence
  Synthetic
ccgttttttttttttacagttgc

SEQ ID NO: 14320 - DNA, 23 bp, Artificial Sequence
  Synthetic
ccgttttttttttttcatggtta

SEQ ID NO: 14321 - DNA, 23 bp, Artificial Sequence
  Synthetic
ccgttttttttttttcagttctt

SEQ ID NO: 14322 - DNA, 23 bp, Artificial Sequence
  Synthetic
ccgttttttttttttgaaatccc

SEQ ID NO: 14323 - DNA, 23 bp, Artificial Sequence
  Synthetic
ccgttttttttttttgcggaact

SEQ ID NO: 14324 - DNA, 23 bp, Artificial Sequence
  Synthetic
ccgttttttttttttcaggccgg

SEQ ID NO: 14325 - DNA, 23 bp, Artificial Sequence
  Synthetic
ccgttttttttttttacaagttc

SEQ ID NO: 14326 - DNA, 23 bp, Artificial Sequence
  Synthetic
ccgttttttttttttcagttatc

SEQ ID NO: 14327 - DNA, 23 bp, Artificial Sequence
  Synthetic
ccgttttttttttttatagccct

SEQ ID NO: 14328 - DNA, 23 bp, Artificial Sequence
  Synthetic
ccgttttttttttttcaggagtc

SEQ ID NO: 14329 - DNA, 23 bp, Artificial Sequence
  Synthetic
ccgttttttttttttctgcactg

SEQ ID NO: 14330 - DNA, 23 bp, Artificial Sequence
  Synthetic
ccgttttttttttttatagccct

SEQ ID NO: 14331 - DNA, 23 bp, Artificial Sequence
  Synthetic
ccgttttttttttttgcattcac

SEQ ID NO: 14332 - DNA, 23 bp, Artificial Sequence
  Synthetic
ccgttttttttttttacaagtta

SEQ ID NO: 14333 - DNA, 23 bp, Artificial Sequence
  Synthetic
ccgttttttttttttgccaagct

SEQ ID NO: 14334 - DNA, 23 bp, Artificial Sequence
  Synthetic
ccgttttttttttttcagctggt

SEQ ID NO: 14335 - DNA, 23 bp, Artificial Sequence
  Synthetic
ccgttttttttttttacatagga

SEQ ID NO: 14336 - DNA, 23 bp, Artificial Sequence
  Synthetic
ccgttttttttttttgacacgtg

SEQ ID NO: 14337 - DNA, 23 bp, Artificial Sequence
  Synthetic
ccgttttttttttttagctacag

SEQ ID NO: 14338 - DNA, 23 bp, Artificial Sequence
  Synthetic
ccgttttttttttttacaaacca

SEQ ID NO: 14339 - DNA, 23 bp, Artificial Sequence
  Synthetic
ccgttttttttttttaaaccatg

SEQ ID NO: 14340 - DNA, 23 bp, Artificial Sequence
  Synthetic
ccgttttttttttttgccaatat

SEQ ID NO: 14341 - DNA, 23 bp, Artificial Sequence
  Synthetic
ccgttttttttttttcaagtgcc

SEQ ID NO: 14342 - DNA, 23 bp, Artificial Sequence
  Synthetic
ccgttttttttttttctacctgc

SEQ ID NO: 14343 - DNA, 23 bp, Artificial Sequence
  Synthetic
ccgttttttttttttctgcacta

SEQ ID NO: 14344 - DNA, 23 bp, Artificial Sequence
  Synthetic
ccgttttttttttttctcaccga

SEQ ID NO: 14345 - DNA, 23 bp, Artificial Sequence
  Synthetic
ccgttttttttttttgtacaatc

SEQ ID NO: 14346 - DNA, 23 bp, Artificial Sequence
  Synthetic
ccgttttttttttttacccaccg

SEQ ID NO: 14347 - DNA, 23 bp, Artificial Sequence
  Synthetic
ccgttttttttttttccaacaac

SEQ ID NO: 14348 - DNA, 23 bp, Artificial Sequence
  Synthetic
ccgttttttttttttctagctcc

SEQ ID NO: 14349 - DNA, 23 bp, Artificial Sequence
  Synthetic
ccgttttttttttttaacaggta

SEQ ID NO: 14350 - DNA, 23 bp, Artificial Sequence
  Synthetic
ccgttttttttttttagttttgc

SEQ ID NO: 14351 - DNA, 23 bp, Artificial Sequence
  Synthetic
ccgttttttttttttagttttgc

SEQ ID NO: 14352 - DNA, 23 bp, Artificial Sequence
  Synthetic
ccgttttttttttttcctgcact

SEQ ID NO: 14353 - DNA, 23 bp, Artificial Sequence
  Synthetic
ccgttttttttttttagactccg

SEQ ID NO: 14354 - DNA, 23 bp, Artificial Sequence
  Synthetic
ccgttttttttttttcatggtta

SEQ ID NO: 14355 - DNA, 23 bp, Artificial Sequence
  Synthetic
ccgttttttttttttcagttctt

SEQ ID NO: 14356 - DNA, 23 bp, Artificial Sequence
  Synthetic
ccgttttttttttttagaccgag

SEQ ID NO: 14357 - DNA, 23 bp, Artificial Sequence
  Synthetic
ccgttttttttttttgcctatcc

SEQ ID NO: 14358 - DNA, 23 bp, Artificial Sequence
  Synthetic
ccgttttttttttttcaatagac

SEQ ID NO: 14359 - DNA, 23 bp, Artificial Sequence
  Synthetic
ccgttttttttttttaccgattt

SEQ ID NO: 14360 - DNA, 23 bp, Artificial Sequence
  Synthetic
ccgttttttttttttctgatttc

SEQ ID NO: 14361 - DNA, 23 bp, Artificial Sequence
  Synthetic
ccgttttttttttttctgagtgt

SEQ ID NO: 14362 - DNA, 23 bp, Artificial Sequence
  Synthetic
ccgttttttttttttctgagagt

SEQ ID NO: 14363 - DNA, 23 bp, Artificial Sequence
  Synthetic
ccgttttttttttttcaaccagc

SEQ ID NO: 14364 - DNA, 23 bp, Artificial Sequence
  Synthetic
ccgttttttttttttacaaaatc

SEQ ID NO: 14365 - DNA, 23 bp, Artificial Sequence
  Synthetic
ccgttttttttttttatacagct

SEQ ID NO: 14366 - DNA, 23 bp, Artificial Sequence
  Synthetic
ccgttttttttttttcaggccgg

SEQ ID NO: 14367 - DNA, 23 bp, Artificial Sequence
  Synthetic
ccgttttttttttttacctgcac

SEQ ID NO: 14368 - DNA, 23 bp, Artificial Sequence
  Synthetic
ccgttttttttttttctcaataa

SEQ ID NO: 14369 - DNA, 23 bp, Artificial Sequence
  Synthetic
ccgttttttttttttacaagatc

SEQ ID NO: 14370 - DNA, 23 bp, Artificial Sequence
  Synthetic
ccgttttttttttttactataca

SEQ ID NO: 14371 - DNA, 23 bp, Artificial Sequence
  Synthetic
ccgttttttttttttaccacaca

SEQ ID NO: 14372 - DNA, 23 bp, Artificial Sequence
  Synthetic
ccgttttttttttttctatgcaa

SEQ ID NO: 14373 - DNA, 23 bp, Artificial Sequence
  Synthetic
ccgttttttttttttactataca

SEQ ID NO: 14374 - DNA, 23 bp, Artificial Sequence
  Synthetic
ccgttttttttttttctgtacaa

SEQ ID NO: 14375 - DNA, 23 bp, Artificial Sequence
  Synthetic
ccgttttttttttttcagcacaa

SEQ ID NO: 14376 - DNA, 23 bp, Artificial Sequence
  Synthetic
ccgttttttttttttcatacttc

SEQ ID NO: 14377 - DNA, 23 bp, Artificial Sequence
  Synthetic
ccgttttttttttttcaagttcg

SEQ ID NO: 14378 - DNA, 23 bp, Artificial Sequence
  Synthetic
ccgttttttttttttcagttatc

SEQ ID NO: 14379 - DNA, 23 bp, Artificial Sequence
  Synthetic
ccgttttttttttttatagccct

SEQ ID NO: 14380 - DNA, 23 bp, Artificial Sequence
  Synthetic
ccgttttttttttttatagccct

SEQ ID NO: 14381 - DNA, 23 bp, Artificial Sequence
  Synthetic
ccgttttttttttttacaaattc

SEQ ID NO: 14382 - DNA, 23 bp, Artificial Sequence
  Synthetic
ccgttttttttttttcaaattcg

SEQ ID NO: 14383 - DNA, 23 bp, Artificial Sequence
  Synthetic
ccgttttttttttttcacaaaca

SEQ ID NO: 14384 - DNA, 23 bp, Artificial Sequence
  Synthetic
ccgttttttttttttgcattcac

SEQ ID NO: 14385 - DNA, 23 bp, Artificial Sequence
  Synthetic
ccgttttttttttttacaagtta

SEQ ID NO: 14386 - DNA, 23 bp, Artificial Sequence
  Synthetic
ccgttttttttttttaagagacc

SEQ ID NO: 14387 - DNA, 23 bp, Artificial Sequence
  Synthetic
ccgttttttttttttgcaagccc

SEQ ID NO: 14388 - DNA, 23 bp, Artificial Sequence
  Synthetic
ccgttttttttttttgccctttt

SEQ ID NO: 14389 - DNA, 23 bp, Artificial Sequence
  Synthetic
ccgttttttttttttgaccatgg

SEQ ID NO: 14390 - DNA, 23 bp, Artificial Sequence
  Synthetic
ccgttttttttttttcagctggt

SEQ ID NO: 14391 - DNA, 23 bp, Artificial Sequence
  Synthetic
ccgttttttttttttacatagga

SEQ ID NO: 14392 - DNA, 23 bp, Artificial Sequence
  Synthetic
ccgttttttttttttacatagga

SEQ ID NO: 14393 - DNA, 23 bp, Artificial Sequence
  Synthetic
ccgttttttttttttacgcgtat

SEQ ID NO: 14394 - DNA, 23 bp, Artificial Sequence
  Synthetic
ccgttttttttttttattcacaa

SEQ ID NO: 14395 - DNA, 23 bp, Artificial Sequence
  Synthetic
ccgttttttttttttcatcttta

SEQ ID NO: 14396 - DNA, 23 bp, Artificial Sequence
  Synthetic
ccgttttttttttttcataaagt

SEQ ID NO: 14397 - DNA, 23 bp, Artificial Sequence
  Synthetic
ccgttttttttttttgagctaca

SEQ ID NO: 14398 - DNA, 23 bp, Artificial Sequence
  Synthetic
ccgttttttttttttcagtacat

SEQ ID NO: 14399 - DNA, 23 bp, Artificial Sequence
  Synthetic
ccgttttttttttttgggattcc

SEQ ID NO: 14400 - DNA, 23 bp, Artificial Sequence
  Synthetic
ccgttttttttttttccaagttc

SEQ ID NO: 14401 - DNA, 23 bp, Artificial Sequence
  Synthetic
ccgttttttttttttacaaacca

SEQ ID NO: 14402 - DNA, 23 bp, Artificial Sequence
  Synthetic
ccgttttttttttttgccaatat

SEQ ID NO: 14403 - DNA, 23 bp, Artificial Sequence
  Synthetic
ccgttttttttttttcaagtgcc

SEQ ID NO: 14404 - DNA, 23 bp, Artificial Sequence
  Synthetic
ccgttttttttttttctacctgc

SEQ ID NO: 14405 - DNA, 23 bp, Artificial Sequence
  Synthetic
ccgttttttttttttctgcacta

SEQ ID NO: 14406 - DNA, 23 bp, Artificial Sequence
  Synthetic
ccgttttttttttttctcaccga

SEQ ID NO: 14407 - DNA, 23 bp, Artificial Sequence
  Synthetic
ccgttttttttttttccaccgac

SEQ ID NO: 14408 - DNA, 23 bp, Artificial Sequence
  Synthetic
ccgttttttttttttctcaccga

SEQ ID NO: 14409 - DNA, 23 bp, Artificial Sequence
  Synthetic
ccgttttttttttttgagttcta

SEQ ID NO: 14410 - DNA, 23 bp, Artificial Sequence
  Synthetic
ccgttttttttttttagtgaatt

SEQ ID NO: 14411 - DNA, 23 bp, Artificial Sequence
  Synthetic
ccgttttttttttttcccttatc

SEQ ID NO: 14412 - DNA, 23 bp, Artificial Sequence
  Synthetic
ccgttttttttttttagcccaaa

SEQ ID NO: 14413 - DNA, 23 bp, Artificial Sequence
  Synthetic
ccgttttttttttttgctgcaac

SEQ ID NO: 14414 - DNA, 23 bp, Artificial Sequence
  Synthetic
ccgttttttttttttgctgcttt

SEQ ID NO: 14415 - DNA, 23 bp, Artificial Sequence
  Synthetic
ccgttttttttttttgggacttt

SEQ ID NO: 14416 - DNA, 23 bp, Artificial Sequence
  Synthetic
ccgttttttttttttcaacaaca

SEQ ID NO: 14417 - DNA, 23 bp, Artificial Sequence
  Synthetic
ccgttttttttttttaacagata

SEQ ID NO: 14418 - DNA, 23 bp, Artificial Sequence
  Synthetic
ccgttttttttttttagttttgc

SEQ ID NO: 14419 - DNA, 23 bp, Artificial Sequence
  Synthetic
ccgttttttttttttagttttgc

SEQ ID NO: 14420 - DNA, 23 bp, Artificial Sequence
  Synthetic
ccgttttttttttttacctgcac

SEQ ID NO: 14421 - DNA, 23 bp, Artificial Sequence
  Synthetic
ccgttttttttttttcatcgtta

SEQ ID NO: 14422 - DNA, 23 bp, Artificial Sequence
  Synthetic
ccgttttttttttttcagcactg

SEQ ID NO: 14423 - DNA, 23 bp, Artificial Sequence
  Synthetic
ccgttttttttttttatcattac

SEQ ID NO: 14424 - DNA, 23 bp, Artificial Sequence
  Synthetic
ccgttttttttttttcatcatta

SEQ ID NO: 14425 - DNA, 23 bp, Artificial Sequence
  Synthetic
ccgttttttttttttaagtggtc

SEQ ID NO: 14426 - DNA, 23 bp, Artificial Sequence
  Synthetic
ccgttttttttttttggcatagg

SEQ ID NO: 14427 - DNA, 23 bp, Artificial Sequence
  Synthetic
ccgttttttttttttacacactt

SEQ ID NO: 14428 - DNA, 23 bp, Artificial Sequence
  Synthetic
ccgttttttttttttcgagcttt

SEQ ID NO: 14429 - DNA, 23 bp, Artificial Sequence
  Synthetic
ccgttttttttttttaacatcag

SEQ ID NO: 14430 - DNA, 23 bp, Artificial Sequence
  Synthetic
ccgttttttttttttgccgtgac

SEQ ID NO: 14431 - DNA, 23 bp, Artificial Sequence
  Synthetic
ccgttttttttttttgcctgtct

SEQ ID NO: 14432 - DNA, 23 bp, Artificial Sequence
  Synthetic
ccgttttttttttttacagttgc

SEQ ID NO: 14433 - DNA, 23 bp, Artificial Sequence
  Synthetic
ccgttttttttttttccaatcag

SEQ ID NO: 14434 - DNA, 23 bp, Artificial Sequence
  Synthetic
ccgttttttttttttcatggtta

SEQ ID NO: 14435 - DNA, 23 bp, Artificial Sequence
  Synthetic
ccgttttttttttttgaattgcg

SEQ ID NO: 14436 - DNA, 23 bp, Artificial Sequence
  Synthetic
ccgttttttttttttcagttctt

SEQ ID NO: 14437 - DNA, 23 bp, Artificial Sequence
  Synthetic
ccgttttttttttttaaacccag

SEQ ID NO: 14438 - DNA, 23 bp, Artificial Sequence
  Synthetic
ccgttttttttttttagacccag

SEQ ID NO: 14439 - DNA, 23 bp, Artificial Sequence
  Synthetic
ccgttttttttttttgggtattt

SEQ ID NO: 14440 - DNA, 23 bp, Artificial Sequence
  Synthetic
ccgttttttttttttaaatccct

SEQ ID NO: 14441 - DNA, 23 bp, Artificial Sequence
  Synthetic
ccgttttttttttttgtaatccc

SEQ ID NO: 14442 - DNA, 23 bp, Artificial Sequence
  Synthetic
ccgttttttttttttgctgaact

SEQ ID NO: 14443 - DNA, 23 bp, Artificial Sequence
  Synthetic
ccgttttttttttttagaccgag

SEQ ID NO: 14444 - DNA, 23 bp, Artificial Sequence
  Synthetic
ccgttttttttttttcggaactt

SEQ ID NO: 14445 - DNA, 23 bp, Artificial Sequence
  Synthetic
ccgttttttttttttcagaactt

SEQ ID NO: 14446 - DNA, 23 bp, Artificial Sequence
  Synthetic
ccgttttttttttttccgatttc

SEQ ID NO: 14447 - DNA, 23 bp, Artificial Sequence
  Synthetic
ccgttttttttttttctgatttc

SEQ ID NO: 14448 - DNA, 23 bp, Artificial Sequence
  Synthetic
ccgttttttttttttaaaacatg

SEQ ID NO: 14449 - DNA, 23 bp, Artificial Sequence
  Synthetic
ccgttttttttttttcaaaacat

SEQ ID NO: 14450 - DNA, 23 bp, Artificial Sequence
  Synthetic
ccgttttttttttttctgaaaca

SEQ ID NO: 14451 - DNA, 23 bp, Artificial Sequence
  Synthetic
ccgttttttttttttctcaaaca

SEQ ID NO: 14452 - DNA, 23 bp, Artificial Sequence
  Synthetic
ccgttttttttttttccagtcga

SEQ ID NO: 14453 - DNA, 23 bp, Artificial Sequence
  Synthetic
ccgttttttttttttagctatgc

SEQ ID NO: 14454 - DNA, 23 bp, Artificial Sequence
  Synthetic
ccgttttttttttttcaacttag

SEQ ID NO: 14455 - DNA, 23 bp, Artificial Sequence
  Synthetic
ccgttttttttttttaacaaaat

SEQ ID NO: 14456 - DNA, 23 bp, Artificial Sequence
  Synthetic
ccgttttttttttttacaaccag

SEQ ID NO: 14457 - DNA, 23 bp, Artificial Sequence
  Synthetic
ccgttttttttttttaaggattt

SEQ ID NO: 14458 - DNA, 23 bp, Artificial Sequence
  Synthetic
ccgttttttttttttaccattgc

SEQ ID NO: 14459 - DNA, 23 bp, Artificial Sequence
  Synthetic
ccgttttttttttttacgcgagc

SEQ ID NO: 14460 - DNA, 23 bp, Artificial Sequence
  Synthetic
ccgttttttttttttgccacaat

SEQ ID NO: 14461 - DNA, 23 bp, Artificial Sequence
  Synthetic
ccgttttttttttttgacggaca

SEQ ID NO: 14462 - DNA, 23 bp, Artificial Sequence
  Synthetic
ccgttttttttttttccagctaa

SEQ ID NO: 14463 - DNA, 23 bp, Artificial Sequence
  Synthetic
ccgttttttttttttacacagta

SEQ ID NO: 14464 - DNA, 23 bp, Artificial Sequence
  Synthetic
ccgttttttttttttaacaaaat

SEQ ID NO: 14465 - DNA, 23 bp, Artificial Sequence
  Synthetic
ccgttttttttttttatacagct

SEQ ID NO: 14466 - DNA, 23 bp, Artificial Sequence
  Synthetic
ccgttttttttttttctttcggt

SEQ ID NO: 14467 - DNA, 23 bp, Artificial Sequence
  Synthetic
ccgttttttttttttaggccggg

SEQ ID NO: 14468 - DNA, 23 bp, Artificial Sequence
  Synthetic
ccgttttttttttttacctgcac

SEQ ID NO: 14469 - DNA, 23 bp, Artificial Sequence
  Synthetic
ccgttttttttttttgcaaaaat

SEQ ID NO: 14470 - DNA, 23 bp, Artificial Sequence
  Synthetic
ccgttttttttttttccgcacag

SEQ ID NO: 14471 - DNA, 23 bp, Artificial Sequence
  Synthetic
ccgttttttttttttggactacc

SEQ ID NO: 14472 - DNA, 23 bp, Artificial Sequence
  Synthetic
ccgttttttttttttagctattc

SEQ ID NO: 14473 - DNA, 23 bp, Artificial Sequence
  Synthetic
ccgttttttttttttcgggagag

SEQ ID NO: 14474 - DNA, 23 bp, Artificial Sequence
  Synthetic
ccgttttttttttttaagggttc

SEQ ID NO: 14475 - DNA, 23 bp, Artificial Sequence
  Synthetic
ccgttttttttttttgtcatgct

SEQ ID NO: 14476 - DNA, 23 bp, Artificial Sequence
  Synthetic
ccgttttttttttttcagtagac

SEQ ID NO: 14477 - DNA, 23 bp, Artificial Sequence
  Synthetic
ccgttttttttttttctgtcatt

SEQ ID NO: 14478 - DNA, 23 bp, Artificial Sequence
  Synthetic
ccgttttttttttttgtaatctc

SEQ ID NO: 14479 - DNA, 23 bp, Artificial Sequence
  Synthetic
ccgttttttttttttctattgtt

SEQ ID NO: 14480 - DNA, 23 bp, Artificial Sequence
  Synthetic
ccgttttttttttttaaggaagt

SEQ ID NO: 14481 - DNA, 23 bp, Artificial Sequence
  Synthetic
ccgttttttttttttaagagggg

SEQ ID NO: 14482 - DNA, 23 bp, Artificial Sequence
  Synthetic
ccgttttttttttttagcgcaac

SEQ ID NO: 14483 - DNA, 23 bp, Artificial Sequence
  Synthetic
ccgttttttttttttgaataaca

SEQ ID NO: 14484 - DNA, 23 bp, Artificial Sequence
  Synthetic
ccgttttttttttttagacgacc

SEQ ID NO: 14485 - DNA, 23 bp, Artificial Sequence
  Synthetic
ccgttttttttttttaaaccacc

SEQ ID NO: 14486 - DNA, 23 bp, Artificial Sequence
  Synthetic
ccgttttttttttttataaaggt

SEQ ID NO: 14487 - DNA, 23 bp, Artificial Sequence
  Synthetic
ccgttttttttttttggttaccg

SEQ ID NO: 14488 - DNA, 23 bp, Artificial Sequence
  Synthetic
ccgttttttttttttaccaaacc

SEQ ID NO: 14489 - DNA, 23 bp, Artificial Sequence
  Synthetic
ccgttttttttttttaaaaggtc

SEQ ID NO: 14490 - DNA, 23 bp, Artificial Sequence
  Synthetic
ccgttttttttttttacaagttc

SEQ ID NO: 14491 - DNA, 23 bp, Artificial Sequence
  Synthetic
ccgttttttttttttcagttatc

SEQ ID NO: 14492 - DNA, 23 bp, Artificial Sequence
  Synthetic
ccgttttttttttttatagccct

SEQ ID NO: 14493 - DNA, 23 bp, Artificial Sequence
  Synthetic
ccgttttttttttttcaggagtc

SEQ ID NO: 14494 - DNA, 23 bp, Artificial Sequence
  Synthetic
ccgttttttttttttctacctgc

SEQ ID NO: 14495 - DNA, 23 bp, Artificial Sequence
  Synthetic
ccgttttttttttttctgcactg

SEQ ID NO: 14496 - DNA, 23 bp, Artificial Sequence
  Synthetic
ccgttttttttttttatagccct

SEQ ID NO: 14497 - DNA, 23 bp, Artificial Sequence
  Synthetic
ccgttttttttttttgcattcac

SEQ ID NO: 14498 - DNA, 23 bp, Artificial Sequence
  Synthetic
ccgttttttttttttacaagtta

SEQ ID NO: 14499 - DNA, 23 bp, Artificial Sequence
  Synthetic
ccgttttttttttttgccaagct

SEQ ID NO: 14500 - DNA, 23 bp, Artificial Sequence
  Synthetic
ccgttttttttttttaaagagac

SEQ ID NO: 14501 - DNA, 23 bp, Artificial Sequence
  Synthetic
ccgttttttttttttccctttta

SEQ ID NO: 14502 - DNA, 23 bp, Artificial Sequence
  Synthetic
ccgttttttttttttcagctggt

SEQ ID NO: 14503 - DNA, 23 bp, Artificial Sequence
  Synthetic
ccgttttttttttttacatagga

SEQ ID NO: 14504 - DNA, 23 bp, Artificial Sequence
  Synthetic
ccgttttttttttttcatcttta

SEQ ID NO: 14505 - DNA, 23 bp, Artificial Sequence
  Synthetic
ccgttttttttttttagggattc

SEQ ID NO: 14506 - DNA, 23 bp, Artificial Sequence
  Synthetic
ccgttttttttttttacttttgt

SEQ ID NO: 14507 - DNA, 23 bp, Artificial Sequence
  Synthetic
ccgttttttttttttacaaacca

SEQ ID NO: 14508 - DNA, 23 bp, Artificial Sequence
  Synthetic
ccgttttttttttttaaaccatg

SEQ ID NO: 14509 - DNA, 23 bp, Artificial Sequence
  Synthetic
ccgttttttttttttgccaatat

SEQ ID NO: 14510 - DNA, 23 bp, Artificial Sequence
  Synthetic
ccgttttttttttttcaagtgcc

SEQ ID NO: 14511 - DNA, 23 bp, Artificial Sequence
  Synthetic
ccgttttttttttttctacctgc

SEQ ID NO: 14512 - DNA, 23 bp, Artificial Sequence
  Synthetic
ccgttttttttttttctgcacta

SEQ ID NO: 14513 - DNA, 23 bp, Artificial Sequence
  Synthetic
ccgttttttttttttctcaccga

SEQ ID NO: 14514 - DNA, 23 bp, Artificial Sequence
  Synthetic
ccgttttttttttttgtacaatc

SEQ ID NO: 14515 - DNA, 23 bp, Artificial Sequence
  Synthetic
ccgttttttttttttacccaccg

SEQ ID NO: 14516 - DNA, 23 bp, Artificial Sequence
  Synthetic
ccgttttttttttttctcaccga

SEQ ID NO: 14517 - DNA, 23 bp, Artificial Sequence
  Synthetic
ccgttttttttttttgagttcta

SEQ ID NO: 14518 - DNA, 23 bp, Artificial Sequence
  Synthetic
ccgttttttttttttagtgaatt

SEQ ID NO: 14519 - DNA, 23 bp, Artificial Sequence
  Synthetic
ccgttttttttttttccctccac

SEQ ID NO: 14520 - DNA, 23 bp, Artificial Sequence
  Synthetic
ccgttttttttttttctgatatc

SEQ ID NO: 14521 - DNA, 23 bp, Artificial Sequence
  Synthetic
ccgttttttttttttcctaatat

SEQ ID NO: 14522 - DNA, 23 bp, Artificial Sequence
  Synthetic
ccgttttttttttttcacatgga

SEQ ID NO: 14523 - DNA, 23 bp, Artificial Sequence
  Synthetic
ccgttttttttttttcaacaaca

SEQ ID NO: 14524 - DNA, 23 bp, Artificial Sequence
  Synthetic
ccgttttttttttttctatttcc

SEQ ID NO: 14525 - DNA, 23 bp, Artificial Sequence
  Synthetic
ccgttttttttttttaacaggta

SEQ ID NO: 14526 - DNA, 23 bp, Artificial Sequence
  Synthetic
ccgttttttttttttagttttgc

SEQ ID NO: 14527 - DNA, 23 bp, Artificial Sequence
  Synthetic
ccgttttttttttttagttttgc

SEQ ID NO: 14528 - DNA, 23 bp, Artificial Sequence
  Synthetic
ccgttttttttttttcctgcact

SEQ ID NO: 14529 - DNA, 23 bp, Artificial Sequence
  Synthetic
ccgttttttttttttcatcatta

SEQ ID NO: 14530 - DNA, 23 bp, Artificial Sequence
  Synthetic
ccgttttttttttttaacatcag

SEQ ID NO: 14531 - DNA, 23 bp, Artificial Sequence
  Synthetic
ccgttttttttttttggcaaagg

SEQ ID NO: 14532 - DNA, 23 bp, Artificial Sequence
  Synthetic
ccgttttttttttttgcctgtct

SEQ ID NO: 14533 - DNA, 23 bp, Artificial Sequence
  Synthetic
ccgttttttttttttctgtcaat

SEQ ID NO: 14534 - DNA, 23 bp, Artificial Sequence
  Synthetic
ccgttttttttttttcatggtta

SEQ ID NO: 14535 - DNA, 23 bp, Artificial Sequence
  Synthetic
ccgttttttttttttgaattgcg

SEQ ID NO: 14536 - DNA, 23 bp, Artificial Sequence
  Synthetic
ccgttttttttttttcagttctt

SEQ ID NO: 14537 - DNA, 23 bp, Artificial Sequence
  Synthetic
ccgttttttttttttaagtgtca

SEQ ID NO: 14538 - DNA, 23 bp, Artificial Sequence
  Synthetic
ccgttttttttttttaaacccag

SEQ ID NO: 14539 - DNA, 23 bp, Artificial Sequence
  Synthetic
ccgttttttttttttgggtattt

SEQ ID NO: 14540 - DNA, 23 bp, Artificial Sequence
  Synthetic
ccgttttttttttttaacggaac

SEQ ID NO: 14541 - DNA, 23 bp, Artificial Sequence
  Synthetic
ccgttttttttttttgaaatccc

SEQ ID NO: 14542 - DNA, 23 bp, Artificial Sequence
  Synthetic
ccgttttttttttttgttcctgc

SEQ ID NO: 14543 - DNA, 23 bp, Artificial Sequence
  Synthetic
ccgttttttttttttagaccgag

SEQ ID NO: 14544 - DNA, 23 bp, Artificial Sequence
  Synthetic
ccgttttttttttttgcctatcc

SEQ ID NO: 14545 - DNA, 23 bp, Artificial Sequence
  Synthetic
ccgttttttttttttgcggaact

SEQ ID NO: 14546 - DNA, 23 bp, Artificial Sequence
  Synthetic
ccgttttttttttttcaatagac

SEQ ID NO: 14547 - DNA, 23 bp, Artificial Sequence
  Synthetic
ccgttttttttttttaccgattt

SEQ ID NO: 14548 - DNA, 23 bp, Artificial Sequence
  Synthetic
ccgttttttttttttctgcaaac

SEQ ID NO: 14549 - DNA, 23 bp, Artificial Sequence
  Synthetic
ccgttttttttttttccagtcga

SEQ ID NO: 14550 - DNA, 23 bp, Artificial Sequence
  Synthetic
ccgttttttttttttctgagtgt

SEQ ID NO: 14551 - DNA, 23 bp, Artificial Sequence
  Synthetic
ccgttttttttttttagctatgc

SEQ ID NO: 14552 - DNA, 23 bp, Artificial Sequence
  Synthetic
ccgttttttttttttcaacttag

SEQ ID NO: 14553 - DNA, 23 bp, Artificial Sequence
  Synthetic
ccgttttttttttttaatgcaac

SEQ ID NO: 14554 - DNA, 23 bp, Artificial Sequence
  Synthetic
ccgttttttttttttcaaccagc

SEQ ID NO: 14555 - DNA, 23 bp, Artificial Sequence
  Synthetic
ccgttttttttttttcaggccgg

SEQ ID NO: 14556 - DNA, 23 bp, Artificial Sequence
  Synthetic
ccgttttttttttttacctgcac

SEQ ID NO: 14557 - DNA, 23 bp, Artificial Sequence
  Synthetic
ccgttttttttttttcaaaaatg

SEQ ID NO: 14558 - DNA, 23 bp, Artificial Sequence
  Synthetic
ccgttttttttttttacaataca

SEQ ID NO: 14559 - DNA, 23 bp, Artificial Sequence
  Synthetic
ccgttttttttttttacaagatc

SEQ ID NO: 14560 - DNA, 23 bp, Artificial Sequence
  Synthetic
ccgttttttttttttctatacaa

SEQ ID NO: 14561 - DNA, 23 bp, Artificial Sequence
  Synthetic
ccgttttttttttttaccacaca

SEQ ID NO: 14562 - DNA, 23 bp, Artificial Sequence
  Synthetic
ccgttttttttttttaccataca

SEQ ID NO: 14563 - DNA, 23 bp, Artificial Sequence
  Synthetic
ccgttttttttttttctatgcaa

SEQ ID NO: 14564 - DNA, 23 bp, Artificial Sequence
  Synthetic
ccgttttttttttttgaaaggca

SEQ ID NO: 14565 - DNA, 23 bp, Artificial Sequence
  Synthetic
ccgttttttttttttctatacaa

SEQ ID NO: 14566 - DNA, 23 bp, Artificial Sequence
  Synthetic
ccgttttttttttttctatacaa

SEQ ID NO: 14567 - DNA, 23 bp, Artificial Sequence
  Synthetic
ccgttttttttttttctgtacaa

SEQ ID NO: 14568 - DNA, 23 bp, Artificial Sequence
  Synthetic
ccgttttttttttttcagcacaa

SEQ ID NO: 14569 - DNA, 23 bp, Artificial Sequence
  Synthetic
ccgttttttttttttcatacttc

SEQ ID NO: 14570 - DNA, 23 bp, Artificial Sequence
  Synthetic
ccgttttttttttttacaagttc

SEQ ID NO: 14571 - DNA, 23 bp, Artificial Sequence
  Synthetic
ccgttttttttttttcagttatc

SEQ ID NO: 14572 - DNA, 23 bp, Artificial Sequence
  Synthetic
ccgttttttttttttcagctatc

SEQ ID NO: 14573 - DNA, 23 bp, Artificial Sequence
  Synthetic
ccgttttttttttttatagccct

SEQ ID NO: 14574 - DNA, 23 bp, Artificial Sequence
  Synthetic
ccgttttttttttttcctgcact

SEQ ID NO: 14575 - DNA, 23 bp, Artificial Sequence
  Synthetic
ccgttttttttttttctgcactg

SEQ ID NO: 14576 - DNA, 23 bp, Artificial Sequence
  Synthetic
ccgttttttttttttatagccct

SEQ ID NO: 14577 - DNA, 23 bp, Artificial Sequence
  Synthetic
ccgttttttttttttacaaattc

SEQ ID NO: 14578 - DNA, 23 bp, Artificial Sequence
  Synthetic
ccgttttttttttttcacaaatt

SEQ ID NO: 14579 - DNA, 23 bp, Artificial Sequence
  Synthetic
ccgttttttttttttcaaacacc

SEQ ID NO: 14580 - DNA, 23 bp, Artificial Sequence
  Synthetic
ccgttttttttttttgcattcac

SEQ ID NO: 14581 - DNA, 23 bp, Artificial Sequence
  Synthetic
ccgttttttttttttacaggtta

SEQ ID NO: 14582 - DNA, 23 bp, Artificial Sequence
  Synthetic
ccgttttttttttttacaagtta

SEQ ID NO: 14583 - DNA, 23 bp, Artificial Sequence
  Synthetic
ccgttttttttttttcattatta

SEQ ID NO: 14584 - DNA, 23 bp, Artificial Sequence
  Synthetic
ccgttttttttttttgcgtacca

SEQ ID NO: 14585 - DNA, 23 bp, Artificial Sequence
  Synthetic
ccgttttttttttttccaagctc

SEQ ID NO: 14586 - DNA, 23 bp, Artificial Sequence
  Synthetic
ccgttttttttttttaaagagac

SEQ ID NO: 14587 - DNA, 23 bp, Artificial Sequence
  Synthetic
ccgttttttttttttaaagagac

SEQ ID NO: 14588 - DNA, 23 bp, Artificial Sequence
  Synthetic
ccgttttttttttttgctttttg

SEQ ID NO: 14589 - DNA, 23 bp, Artificial Sequence
  Synthetic
ccgttttttttttttgcaagccc

SEQ ID NO: 14590 - DNA, 23 bp, Artificial Sequence
  Synthetic
ccgttttttttttttgccctttt

SEQ ID NO: 14591 - DNA, 23 bp, Artificial Sequence
  Synthetic
ccgttttttttttttgccctttc

SEQ ID NO: 14592 - DNA, 23 bp, Artificial Sequence
  Synthetic
ccgttttttttttttgaccatgg

SEQ ID NO: 14593 - DNA, 23 bp, Artificial Sequence
  Synthetic
ccgttttttttttttcagctggt

SEQ ID NO: 14594 - DNA, 23 bp, Artificial Sequence
  Synthetic
ccgttttttttttttggttccat

SEQ ID NO: 14595 - DNA, 23 bp, Artificial Sequence
  Synthetic
ccgttttttttttttgctggttg

SEQ ID NO: 14596 - DNA, 23 bp, Artificial Sequence
  Synthetic
ccgttttttttttttccctctgg

SEQ ID NO: 14597 - DNA, 23 bp, Artificial Sequence
  Synthetic
ccgttttttttttttacatagga

SEQ ID NO: 14598 - DNA, 23 bp, Artificial Sequence
  Synthetic
ccgttttttttttttacatagga

SEQ ID NO: 14599 - DNA, 23 bp, Artificial Sequence
  Synthetic
ccgttttttttttttcatcatca

SEQ ID NO: 14600 - DNA, 23 bp, Artificial Sequence
  Synthetic
ccgttttttttttttacgcgtat

SEQ ID NO: 14601 - DNA, 23 bp, Artificial Sequence
  Synthetic
ccgttttttttttttattcacaa

SEQ ID NO: 14602 - DNA, 23 bp, Artificial Sequence
  Synthetic
ccgttttttttttttgacacgtg

SEQ ID NO: 14603 - DNA, 23 bp, Artificial Sequence
  Synthetic
ccgttttttttttttaccatagg

SEQ ID NO: 14604 - DNA, 23 bp, Artificial Sequence
  Synthetic
ccgttttttttttttcgtggttc

SEQ ID NO: 14605 - DNA, 23 bp, Artificial Sequence
  Synthetic
ccgttttttttttttcatcttta

SEQ ID NO: 14606 - DNA, 23 bp, Artificial Sequence
  Synthetic
ccgttttttttttttcataaagt

SEQ ID NO: 14607 - DNA, 23 bp, Artificial Sequence
  Synthetic
ccgttttttttttttagtgcttt

SEQ ID NO: 14608 - DNA, 23 bp, Artificial Sequence
  Synthetic
ccgttttttttttttagctacag

SEQ ID NO: 14609 - DNA, 23 bp, Artificial Sequence
  Synthetic
ccgttttttttttttagtacatc

SEQ ID NO: 14610 - DNA, 23 bp, Artificial Sequence
  Synthetic
ccgttttttttttttagggattc

SEQ ID NO: 14611 - DNA, 23 bp, Artificial Sequence
  Synthetic
ccgttttttttttttacccatgg

SEQ ID NO: 14612 - DNA, 23 bp, Artificial Sequence
  Synthetic
ccgttttttttttttgcctatgg

SEQ ID NO: 14613 - DNA, 23 bp, Artificial Sequence
  Synthetic
ccgttttttttttttcaaagttc

SEQ ID NO: 14614 - DNA, 23 bp, Artificial Sequence
  Synthetic
ccgttttttttttttcaaagttc

SEQ ID NO: 14615 - DNA, 23 bp, Artificial Sequence
  Synthetic
ccgttttttttttttgagtgaag

SEQ ID NO: 14616 - DNA, 23 bp, Artificial Sequence
  Synthetic
ccgttttttttttttactggtac

SEQ ID NO: 14617 - DNA, 23 bp, Artificial Sequence
  Synthetic
ccgttttttttttttctcaagga

SEQ ID NO: 14618 - DNA, 23 bp, Artificial Sequence
  Synthetic
ccgttttttttttttccaagttc

SEQ ID NO: 14619 - DNA, 23 bp, Artificial Sequence
  Synthetic
ccgttttttttttttatcacttt

SEQ ID NO: 14620 - DNA, 23 bp, Artificial Sequence
  Synthetic
ccgttttttttttttgaaggcaa

SEQ ID NO: 14621 - DNA, 23 bp, Artificial Sequence
  Synthetic
ccgttttttttttttccctatca

SEQ ID NO: 14622 - DNA, 23 bp, Artificial Sequence
  Synthetic
ccgttttttttttttacaaacca

SEQ ID NO: 14623 - DNA, 23 bp, Artificial Sequence
  Synthetic
ccgttttttttttttaaaccatg

SEQ ID NO: 14624 - DNA, 23 bp, Artificial Sequence
  Synthetic
ccgttttttttttttgccaatat

SEQ ID NO: 14625 - DNA, 23 bp, Artificial Sequence
  Synthetic
ccgttttttttttttcaagtgcc

SEQ ID NO: 14626 - DNA, 23 bp, Artificial Sequence
  Synthetic
ccgttttttttttttctacctgc

SEQ ID NO: 14627 - DNA, 23 bp, Artificial Sequence
  Synthetic
ccgttttttttttttctgcacta

SEQ ID NO: 14628 - DNA, 23 bp, Artificial Sequence
  Synthetic
ccgttttttttttttctcaccga

SEQ ID NO: 14629 - DNA, 23 bp, Artificial Sequence
  Synthetic
ccgttttttttttttgtacaatc

SEQ ID NO: 14630 - DNA, 23 bp, Artificial Sequence
  Synthetic
ccgttttttttttttccaccgac

SEQ ID NO: 14631 - DNA, 23 bp, Artificial Sequence
  Synthetic
ccgttttttttttttctcaccga

SEQ ID NO: 14632 - DNA, 23 bp, Artificial Sequence
  Synthetic
ccgttttttttttttgagttcta

SEQ ID NO: 14633 - DNA, 23 bp, Artificial Sequence
  Synthetic
ccgttttttttttttagtgaatt

SEQ ID NO: 14634 - DNA, 23 bp, Artificial Sequence
  Synthetic
ccgttttttttttttcccttatc

SEQ ID NO: 14635 - DNA, 23 bp, Artificial Sequence
  Synthetic
ccgttttttttttttaactgcct

SEQ ID NO: 14636 - DNA, 23 bp, Artificial Sequence
  Synthetic
ccgttttttttttttagcccaaa

SEQ ID NO: 14637 - DNA, 23 bp, Artificial Sequence
  Synthetic
ccgttttttttttttcggctgca

SEQ ID NO: 14638 - DNA, 23 bp, Artificial Sequence
  Synthetic
ccgttttttttttttccctccac

SEQ ID NO: 14639 - DNA, 23 bp, Artificial Sequence
  Synthetic
ccgttttttttttttctgatatc

SEQ ID NO: 14640 - DNA, 23 bp, Artificial Sequence
  Synthetic
ccgttttttttttttcctaatat

SEQ ID NO: 14641 - DNA, 23 bp, Artificial Sequence
  Synthetic
ccgttttttttttttgctgcttt

SEQ ID NO: 14642 - DNA, 23 bp, Artificial Sequence
  Synthetic
ccgttttttttttttcaattcat

SEQ ID NO: 14643 - DNA, 23 bp, Artificial Sequence
  Synthetic
ccgttttttttttttgggacttt

SEQ ID NO: 14644 - DNA, 23 bp, Artificial Sequence
  Synthetic
ccgttttttttttttcacatgga

SEQ ID NO: 14645 - DNA, 23 bp, Artificial Sequence
  Synthetic
ccgttttttttttttccaatatt

SEQ ID NO: 14646 - DNA, 23 bp, Artificial Sequence
  Synthetic
ccgttttttttttttcaacaaca

SEQ ID NO: 14647 - DNA, 23 bp, Artificial Sequence
  Synthetic
ccgttttttttttttcaacaaca

SEQ ID NO: 14648 - DNA, 23 bp, Artificial Sequence
  Synthetic
ccgttttttttttttaacaggta

SEQ ID NO: 14649 - DNA, 23 bp, Artificial Sequence
  Synthetic
ccgttttttttttttaccaatgt

SEQ ID NO: 14650 - DNA, 23 bp, Artificial Sequence
  Synthetic
ccgttttttttttttaacaggta

SEQ ID NO: 14651 - DNA, 23 bp, Artificial Sequence
  Synthetic
ccgttttttttttttagttttgc

SEQ ID NO: 14652 - DNA, 23 bp, Artificial Sequence
  Synthetic
ccgttttttttttttagttttgc

SEQ ID NO: 14653 - DNA, 23 bp, Artificial Sequence
  Synthetic
ccgttttttttttttcatcgtta

SEQ ID NO: 14654 - DNA, 23 bp, Artificial Sequence
  Synthetic
ccgttttttttttttcatcatta

SEQ ID NO: 14655 - DNA, 23 bp, Artificial Sequence
  Synthetic
ccgttttttttttttcatcatta

SEQ ID NO: 14656 - DNA, 23 bp, Artificial Sequence
  Synthetic
ccgttttttttttttgaacaatg

SEQ ID NO: 14657 - DNA, 23 bp, Artificial Sequence
  Synthetic
ccgttttttttttttcccatgcg

SEQ ID NO: 14658 - DNA, 23 bp, Artificial Sequence
  Synthetic
ccgttttttttttttagtggtcc

SEQ ID NO: 14659 - DNA, 23 bp, Artificial Sequence
  Synthetic
ccgttttttttttttaggcatag

SEQ ID NO: 14660 - DNA, 23 bp, Artificial Sequence
  Synthetic
ccgttttttttttttagactccg

SEQ ID NO: 14661 - DNA, 23 bp, Artificial Sequence
  Synthetic
ccgttttttttttttcacacact

SEQ ID NO: 14662 - DNA, 23 bp, Artificial Sequence
  Synthetic
ccgttttttttttttagggagga

SEQ ID NO: 14663 - DNA, 23 bp, Artificial Sequence
  Synthetic
ccgttttttttttttcaagcttt

SEQ ID NO: 14664 - DNA, 23 bp, Artificial Sequence
  Synthetic
ccgttttttttttttacctgcac

SEQ ID NO: 14665 - DNA, 23 bp, Artificial Sequence
  Synthetic
ccgttttttttttttcctgcact

SEQ ID NO: 14666 - DNA, 23 bp, Artificial Sequence
  Synthetic
ccgttttttttttttaacatcag

SEQ ID NO: 14667 - DNA, 23 bp, Artificial Sequence
  Synthetic
ccgttttttttttttagccgctg

SEQ ID NO: 14668 - DNA, 23 bp, Artificial Sequence
  Synthetic
ccgttttttttttttggcaaagg

SEQ ID NO: 14669 - DNA, 23 bp, Artificial Sequence
  Synthetic
ccgttttttttttttgccgtgac

SEQ ID NO: 14670 - DNA, 23 bp, Artificial Sequence
  Synthetic
ccgttttttttttttgcctgtct

SEQ ID NO: 14671 - DNA, 23 bp, Artificial Sequence
  Synthetic
ccgttttttttttttctgtcaaa

SEQ ID NO: 14672 - DNA, 23 bp, Artificial Sequence
  Synthetic
ccgttttttttttttacagttgc

SEQ ID NO: 14673 - DNA, 23 bp, Artificial Sequence
  Synthetic
ccgttttttttttttacatttgc

SEQ ID NO: 14674 - DNA, 23 bp, Artificial Sequence
  Synthetic
ccgttttttttttttccagtcag

SEQ ID NO: 14675 - DNA, 23 bp, Artificial Sequence
  Synthetic
ccgttttttttttttcatggtta

SEQ ID NO: 14676 - DNA, 23 bp, Artificial Sequence
  Synthetic
ccgttttttttttttgaattgcg

SEQ ID NO: 14677 - DNA, 23 bp, Artificial Sequence
  Synthetic
ccgttttttttttttcagttctt

SEQ ID NO: 14678 - DNA, 23 bp, Artificial Sequence
  Synthetic
ccgttttttttttttaacccagc

SEQ ID NO: 14679 - DNA, 23 bp, Artificial Sequence
  Synthetic
ccgttttttttttttagacccag

SEQ ID NO: 14680 - DNA, 23 bp, Artificial Sequence
  Synthetic
ccgttttttttttttgggtattt

SEQ ID NO: 14681 - DNA, 23 bp, Artificial Sequence
  Synthetic
ccgttttttttttttaacggaac

SEQ ID NO: 14682 - DNA, 23 bp, Artificial Sequence
  Synthetic
ccgttttttttttttgaaatccc

SEQ ID NO: 14683 - DNA, 23 bp, Artificial Sequence
  Synthetic
ccgttttttttttttgtaatccc

SEQ ID NO: 14684 - DNA, 23 bp, Artificial Sequence
  Synthetic
ccgttttttttttttgttcctgc

SEQ ID NO: 14685 - DNA, 23 bp, Artificial Sequence
  Synthetic
ccgttttttttttttagaccgag

SEQ ID NO: 14686 - DNA, 23 bp, Artificial Sequence
  Synthetic
ccgttttttttttttcctatcct

SEQ ID NO: 14687 - DNA, 23 bp, Artificial Sequence
  Synthetic
ccgttttttttttttacctatcc

SEQ ID NO: 14688 - DNA, 23 bp, Artificial Sequence
  Synthetic
ccgttttttttttttcggaactt

SEQ ID NO: 14689 - DNA, 23 bp, Artificial Sequence
  Synthetic
ccgttttttttttttcagaactt

SEQ ID NO: 14690 - DNA, 23 bp, Artificial Sequence
  Synthetic
ccgttttttttttttcaatagac

SEQ ID NO: 14691 - DNA, 23 bp, Artificial Sequence
  Synthetic
ccgttttttttttttaaaagtgc

SEQ ID NO: 14692 - DNA, 23 bp, Artificial Sequence
  Synthetic
ccgttttttttttttgcacacaa

SEQ ID NO: 14693 - DNA, 23 bp, Artificial Sequence
  Synthetic
ccgttttttttttttgagagggc

SEQ ID NO: 14694 - DNA, 23 bp, Artificial Sequence
  Synthetic
ccgttttttttttttacaaacaa

SEQ ID NO: 14695 - DNA, 23 bp, Artificial Sequence
  Synthetic
ccgttttttttttttagagggcc

SEQ ID NO: 14696 - DNA, 23 bp, Artificial Sequence
  Synthetic
ccgttttttttttttcactcaaa

SEQ ID NO: 14697 - DNA, 23 bp, Artificial Sequence
  Synthetic
ccgttttttttttttaaaagagc

SEQ ID NO: 14698 - DNA, 23 bp, Artificial Sequence
  Synthetic
ccgttttttttttttcactacaa

SEQ ID NO: 14699 - DNA, 23 bp, Artificial Sequence
  Synthetic
ccgttttttttttttcacacaaa

SEQ ID NO: 14700 - DNA, 23 bp, Artificial Sequence
  Synthetic
ccgttttttttttttgactcaaa

SEQ ID NO: 14701 - DNA, 23 bp, Artificial Sequence
  Synthetic
ccgttttttttttttcaggattg

SEQ ID NO: 14702 - DNA, 23 bp, Artificial Sequence
  Synthetic
ccgttttttttttttatgcacat

SEQ ID NO: 14703 - DNA, 23 bp, Artificial Sequence
  Synthetic
ccgttttttttttttcatgttca

SEQ ID NO: 14704 - DNA, 23 bp, Artificial Sequence
  Synthetic
ccgttttttttttttgaagaaca

SEQ ID NO: 14705 - DNA, 23 bp, Artificial Sequence
  Synthetic
ccgttttttttttttgtatgtgg

SEQ ID NO: 14706 - DNA, 23 bp, Artificial Sequence
  Synthetic
ccgttttttttttttaccgattt

SEQ ID NO: 14707 - DNA, 23 bp, Artificial Sequence
  Synthetic
ccgttttttttttttacactgat

SEQ ID NO: 14708 - DNA, 23 bp, Artificial Sequence
  Synthetic
ccgttttttttttttccgatttc

SEQ ID NO: 14709 - DNA, 23 bp, Artificial Sequence
  Synthetic
ccgttttttttttttaagagagc

SEQ ID NO: 14710 - DNA, 23 bp, Artificial Sequence
  Synthetic
ccgttttttttttttctttgaca

SEQ ID NO: 14711 - DNA, 23 bp, Artificial Sequence
  Synthetic
ccgttttttttttttctttgaca

SEQ ID NO: 14712 - DNA, 23 bp, Artificial Sequence
  Synthetic
ccgttttttttttttaccaaaac

SEQ ID NO: 14713 - DNA, 23 bp, Artificial Sequence
  Synthetic
ccgttttttttttttactaaaac

SEQ ID NO: 14714 - DNA, 23 bp, Artificial Sequence
  Synthetic
ccgttttttttttttgaaagcat

SEQ ID NO: 14715 - DNA, 23 bp, Artificial Sequence
  Synthetic
ccgttttttttttttcactgaaa

SEQ ID NO: 14716 - DNA, 23 bp, Artificial Sequence
  Synthetic
ccgttttttttttttagcaggta

SEQ ID NO: 14717 - DNA, 23 bp, Artificial Sequence
  Synthetic
ccgttttttttttttcactcaaa

SEQ ID NO: 14718 - DNA, 23 bp, Artificial Sequence
  Synthetic
ccgttttttttttttctgcaaac

SEQ ID NO: 14719 - DNA, 23 bp, Artificial Sequence
  Synthetic
ccgttttttttttttccagtcga

SEQ ID NO: 14720 - DNA, 23 bp, Artificial Sequence
  Synthetic
ccgttttttttttttgctgagtg

SEQ ID NO: 14721 - DNA, 23 bp, Artificial Sequence
  Synthetic
ccgttttttttttttctgagagt

SEQ ID NO: 14722 - DNA, 23 bp, Artificial Sequence
  Synthetic
ccgttttttttttttccagtcgg

SEQ ID NO: 14723 - DNA, 23 bp, Artificial Sequence
  Synthetic
ccgttttttttttttcagtcaag

SEQ ID NO: 14724 - DNA, 23 bp, Artificial Sequence
  Synthetic
ccgttttttttttttgtaaacat

SEQ ID NO: 14725 - DNA, 23 bp, Artificial Sequence
  Synthetic
ccgttttttttttttagctatgc

SEQ ID NO: 14726 - DNA, 23 bp, Artificial Sequence
  Synthetic
ccgttttttttttttcaacttag

SEQ ID NO: 14727 - DNA, 23 bp, Artificial Sequence
  Synthetic
ccgttttttttttttgccctctc

SEQ ID NO: 14728 - DNA, 23 bp, Artificial Sequence
  Synthetic
ccgttttttttttttgcagcgct

SEQ ID NO: 14729 - DNA, 23 bp, Artificial Sequence
  Synthetic
ccgttttttttttttgaggtcga

SEQ ID NO: 14730 - DNA, 23 bp, Artificial Sequence
  Synthetic
ccgttttttttttttcagcagca

SEQ ID NO: 14731 - DNA, 23 bp, Artificial Sequence
  Synthetic
ccgttttttttttttaccaatgc

SEQ ID NO: 14732 - DNA, 23 bp, Artificial Sequence
  Synthetic
ccgttttttttttttcacttact

SEQ ID NO: 14733 - DNA, 23 bp, Artificial Sequence
  Synthetic
ccgttttttttttttctggagga

SEQ ID NO: 14734 - DNA, 23 bp, Artificial Sequence
  Synthetic
ccgttttttttttttcggaaggg

SEQ ID NO: 14735 - DNA, 23 bp, Artificial Sequence
  Synthetic
ccgttttttttttttaaaaggtt

SEQ ID NO: 14736 - DNA, 23 bp, Artificial Sequence
  Synthetic
ccgttttttttttttaatgcaac

SEQ ID NO: 14737 - DNA, 23 bp, Artificial Sequence
  Synthetic
ccgttttttttttttctgcaggc

SEQ ID NO: 14738 - DNA, 23 bp, Artificial Sequence
  Synthetic
ccgttttttttttttaggatagg

SEQ ID NO: 14739 - DNA, 23 bp, Artificial Sequence
  Synthetic
ccgttttttttttttcatttttc

SEQ ID NO: 14740 - DNA, 23 bp, Artificial Sequence
  Synthetic
ccgttttttttttttaaggcatc

SEQ ID NO: 14741 - DNA, 23 bp, Artificial Sequence
  Synthetic
ccgttttttttttttaacaaaat

SEQ ID NO: 14742 - DNA, 23 bp, Artificial Sequence
  Synthetic
ccgttttttttttttagctcctg

SEQ ID NO: 14743 - DNA, 23 bp, Artificial Sequence
  Synthetic
ccgttttttttttttgctataaa

SEQ ID NO: 14744 - DNA, 23 bp, Artificial Sequence
  Synthetic
ccgttttttttttttctgaccga

SEQ ID NO: 14745 - DNA, 23 bp, Artificial Sequence
  Synthetic
ccgttttttttttttacgggtgc

SEQ ID NO: 14746 - DNA, 23 bp, Artificial Sequence
  Synthetic
ccgttttttttttttcagtcagg

SEQ ID NO: 14747 - DNA, 23 bp, Artificial Sequence
  Synthetic
ccgttttttttttttcactggac

SEQ ID NO: 14748 - DNA, 23 bp, Artificial Sequence
  Synthetic
ccgttttttttttttgaggcagg

SEQ ID NO: 14749 - DNA, 23 bp, Artificial Sequence
  Synthetic
ccgttttttttttttacaaccag

SEQ ID NO: 14750 - DNA, 23 bp, Artificial Sequence
  Synthetic
ccgttttttttttttaatcagct

SEQ ID NO: 14751 - DNA, 23 bp, Artificial Sequence
  Synthetic
ccgttttttttttttcaatcagc

SEQ ID NO: 14752 - DNA, 23 bp, Artificial Sequence
  Synthetic
ccgttttttttttttaaagtgta

SEQ ID NO: 14753 - DNA, 23 bp, Artificial Sequence
  Synthetic
ccgttttttttttttaggctcaa

SEQ ID NO: 14754 - DNA, 23 bp, Artificial Sequence
  Synthetic
ccgttttttttttttacccctgg

SEQ ID NO: 14755 - DNA, 23 bp, Artificial Sequence
  Synthetic
ccgttttttttttttacacctag

SEQ ID NO: 14756 - DNA, 23 bp, Artificial Sequence
  Synthetic
ccgttttttttttttcagatgga

SEQ ID NO: 14757 - DNA, 23 bp, Artificial Sequence
  Synthetic
ccgttttttttttttaaggattt

SEQ ID NO: 14758 - DNA, 23 bp, Artificial Sequence
  Synthetic
ccgttttttttttttaccattgc

SEQ ID NO: 14759 - DNA, 23 bp, Artificial Sequence
  Synthetic
ccgttttttttttttagatcaac

SEQ ID NO: 14760 - DNA, 23 bp, Artificial Sequence
  Synthetic
ccgttttttttttttgaatataa

SEQ ID NO: 14761 - DNA, 23 bp, Artificial Sequence
  Synthetic
ccgttttttttttttaccaggtt

SEQ ID NO: 14762 - DNA, 23 bp, Artificial Sequence
  Synthetic
ccgttttttttttttcggacaat

SEQ ID NO: 14763 - DNA, 23 bp, Artificial Sequence
  Synthetic
ccgttttttttttttacttagca

SEQ ID NO: 14764 - DNA, 23 bp, Artificial Sequence
  Synthetic
ccgttttttttttttacgcgagc

SEQ ID NO: 14765 - DNA, 23 bp, Artificial Sequence
  Synthetic
ccgttttttttttttcgtggatt

SEQ ID NO: 14766 - DNA, 23 bp, Artificial Sequence
  Synthetic
ccgttttttttttttcatagaag

SEQ ID NO: 14767 - DNA, 23 bp, Artificial Sequence
  Synthetic
ccgttttttttttttaagtggat

SEQ ID NO: 14768 - DNA, 23 bp, Artificial Sequence
  Synthetic
ccgttttttttttttaccataga

SEQ ID NO: 14769 - DNA, 23 bp, Artificial Sequence
  Synthetic
ccgttttttttttttgtgaaatt

SEQ ID NO: 14770 - DNA, 23 bp, Artificial Sequence
  Synthetic
ccgttttttttttttcaaaagtt

SEQ ID NO: 14771 - DNA, 23 bp, Artificial Sequence
  Synthetic
ccgttttttttttttcacaggac

SEQ ID NO: 14772 - DNA, 23 bp, Artificial Sequence
  Synthetic
ccgttttttttttttctacgttc

SEQ ID NO: 14773 - DNA, 23 bp, Artificial Sequence
  Synthetic
ccgttttttttttttagatgtgg

SEQ ID NO: 14774 - DNA, 23 bp, Artificial Sequence
  Synthetic
ccgttttttttttttcgcatgtt

SEQ ID NO: 14775 - DNA, 23 bp, Artificial Sequence
  Synthetic
ccgttttttttttttcagagagc

SEQ ID NO: 14776 - DNA, 23 bp, Artificial Sequence
  Synthetic
ccgttttttttttttgaatccac

SEQ ID NO: 14777 - DNA, 23 bp, Artificial Sequence
  Synthetic
ccgttttttttttttgccacagt

SEQ ID NO: 14778 - DNA, 23 bp, Artificial Sequence
  Synthetic
ccgttttttttttttgaacaatt

SEQ ID NO: 14779 - DNA, 23 bp, Artificial Sequence
  Synthetic
ccgttttttttttttaggggttc

SEQ ID NO: 14780 - DNA, 23 bp, Artificial Sequence
  Synthetic
ccgttttttttttttacaggcca

SEQ ID NO: 14781 - DNA, 23 bp, Artificial Sequence
  Synthetic
ccgttttttttttttctgagggt

SEQ ID NO: 14782 - DNA, 23 bp, Artificial Sequence
  Synthetic
ccgttttttttttttcggctagt

SEQ ID NO: 14783 - DNA, 23 bp, Artificial Sequence
  Synthetic
ccgttttttttttttgccttctg

SEQ ID NO: 14784 - DNA, 23 bp, Artificial Sequence
  Synthetic
ccgttttttttttttgaggggcc

SEQ ID NO: 14785 - DNA, 23 bp, Artificial Sequence
  Synthetic
ccgttttttttttttcaaaacat

SEQ ID NO: 14786 - DNA, 23 bp, Artificial Sequence
  Synthetic
ccgttttttttttttgcggacac

SEQ ID NO: 14787 - DNA, 23 bp, Artificial Sequence
  Synthetic
ccgttttttttttttcggcatta

SEQ ID NO: 14788 - DNA, 23 bp, Artificial Sequence
  Synthetic
ccgttttttttttttctgcatga

SEQ ID NO: 14789 - DNA, 23 bp, Artificial Sequence
  Synthetic
ccgttttttttttttcaccgagg

SEQ ID NO: 14790 - DNA, 23 bp, Artificial Sequence
  Synthetic
ccgttttttttttttaataatga

SEQ ID NO: 14791 - DNA, 23 bp, Artificial Sequence
  Synthetic
ccgttttttttttttgagtcgag

SEQ ID NO: 14792 - DNA, 23 bp, Artificial Sequence
  Synthetic
ccgttttttttttttgttcaaac

SEQ ID NO: 14793 - DNA, 23 bp, Artificial Sequence
  Synthetic
ccgttttttttttttgggacatc

SEQ ID NO: 14794 - DNA, 23 bp, Artificial Sequence
  Synthetic
ccgttttttttttttccagctaa

SEQ ID NO: 14795 - DNA, 23 bp, Artificial Sequence
  Synthetic
ccgttttttttttttcagctagc

SEQ ID NO: 14796 - DNA, 23 bp, Artificial Sequence
  Synthetic
ccgttttttttttttaggaacac

SEQ ID NO: 14797 - DNA, 23 bp, Artificial Sequence
  Synthetic
ccgttttttttttttcaggaaca

SEQ ID NO: 14798 - DNA, 23 bp, Artificial Sequence
  Synthetic
ccgttttttttttttgcatgcaa

SEQ ID NO: 14799 - DNA, 23 bp, Artificial Sequence
  Synthetic
ccgttttttttttttactcagta

SEQ ID NO: 14800 - DNA, 23 bp, Artificial Sequence
  Synthetic
ccgttttttttttttctcagttt

SEQ ID NO: 14801 - DNA, 23 bp, Artificial Sequence
  Synthetic
ccgttttttttttttgtgtatat

SEQ ID NO: 14802 - DNA, 23 bp, Artificial Sequence
  Synthetic
ccgttttttttttttgatgtagt

SEQ ID NO: 14803 - DNA, 23 bp, Artificial Sequence
  Synthetic
ccgttttttttttttatggacaa

SEQ ID NO: 14804 - DNA, 23 bp, Artificial Sequence
  Synthetic
ccgttttttttttttctcacaga

SEQ ID NO: 14805 - DNA, 23 bp, Artificial Sequence
  Synthetic
ccgttttttttttttacatcagt

SEQ ID NO: 14806 - DNA, 23 bp, Artificial Sequence
  Synthetic
ccgttttttttttttcttatgtg

SEQ ID NO: 14807 - DNA, 23 bp, Artificial Sequence
  Synthetic
ccgttttttttttttatatacat

SEQ ID NO: 14808 - DNA, 23 bp, Artificial Sequence
  Synthetic
ccgttttttttttttgtaggtgt

SEQ ID NO: 14809 - DNA, 23 bp, Artificial Sequence
  Synthetic
ccgttttttttttttgttggtgt

SEQ ID NO: 14810 - DNA, 23 bp, Artificial Sequence
  Synthetic
ccgttttttttttttagacacac

SEQ ID NO: 14811 - DNA, 23 bp, Artificial Sequence
  Synthetic
ccgttttttttttttgacaccaa

SEQ ID NO: 14812 - DNA, 23 bp, Artificial Sequence
  Synthetic
ccgttttttttttttaccagtgc

SEQ ID NO: 14813 - DNA, 23 bp, Artificial Sequence
  Synthetic
ccgttttttttttttgaaaagca

SEQ ID NO: 14814 - DNA, 23 bp, Artificial Sequence
  Synthetic
ccgttttttttttttcaagacgg

SEQ ID NO: 14815 - DNA, 23 bp, Artificial Sequence
  Synthetic
ccgttttttttttttcgggaggg

SEQ ID NO: 14816 - DNA, 23 bp, Artificial Sequence
  Synthetic
ccgttttttttttttagaggaga

SEQ ID NO: 14817 - DNA, 23 bp, Artificial Sequence
  Synthetic
ccgttttttttttttaattcatc

SEQ ID NO: 14818 - DNA, 23 bp, Artificial Sequence
  Synthetic
ccgttttttttttttcggggcag

SEQ ID NO: 14819 - DNA, 23 bp, Artificial Sequence
  Synthetic
ccgttttttttttttgtggatga

SEQ ID NO: 14820 - DNA, 23 bp, Artificial Sequence
  Synthetic
ccgttttttttttttagagtgct

SEQ ID NO: 14821 - DNA, 23 bp, Artificial Sequence
  Synthetic
ccgttttttttttttaccaagaa

SEQ ID NO: 14822 - DNA, 23 bp, Artificial Sequence
  Synthetic
ccgttttttttttttctgccata

SEQ ID NO: 14823 - DNA, 23 bp, Artificial Sequence
  Synthetic
ccgttttttttttttagcatgga

SEQ ID NO: 14824 - DNA, 23 bp, Artificial Sequence
  Synthetic
ccgttttttttttttctcatgga

SEQ ID NO: 14825 - DNA, 23 bp, Artificial Sequence
  Synthetic
ccgttttttttttttggtttccc

SEQ ID NO: 14826 - DNA, 23 bp, Artificial Sequence
  Synthetic
ccgttttttttttttagaagtgc

SEQ ID NO: 14827 - DNA, 23 bp, Artificial Sequence
  Synthetic
ccgttttttttttttagattggc

SEQ ID NO: 14828 - DNA, 23 bp, Artificial Sequence
  Synthetic
ccgttttttttttttcaaaccac

SEQ ID NO: 14829 - DNA, 23 bp, Artificial Sequence
  Synthetic
ccgttttttttttttaacatcac

SEQ ID NO: 14830 - DNA, 23 bp, Artificial Sequence
  Synthetic
ccgttttttttttttgaaccctt

SEQ ID NO: 14831 - DNA, 23 bp, Artificial Sequence
  Synthetic
ccgttttttttttttacccaggg

SEQ ID NO: 14832 - DNA, 23 bp, Artificial Sequence
  Synthetic
ccgttttttttttttaaatcctt

SEQ ID NO: 14833 - DNA, 23 bp, Artificial Sequence
  Synthetic
ccgttttttttttttcagtactg

SEQ ID NO: 14834 - DNA, 23 bp, Artificial Sequence
  Synthetic
ccgttttttttttttgaaaacca

SEQ ID NO: 14835 - DNA, 23 bp, Artificial Sequence
  Synthetic
ccgttttttttttttcggtccta

SEQ ID NO: 14836 - DNA, 23 bp, Artificial Sequence
  Synthetic
ccgttttttttttttcacaccaa

SEQ ID NO: 14837 - DNA, 23 bp, Artificial Sequence
  Synthetic
ccgttttttttttttcaggatcg

SEQ ID NO: 14838 - DNA, 23 bp, Artificial Sequence
  Synthetic
ccgttttttttttttgaccaaca

SEQ ID NO: 14839 - DNA, 23 bp, Artificial Sequence
  Synthetic
ccgttttttttttttagttatca

SEQ ID NO: 14840 - DNA, 23 bp, Artificial Sequence
  Synthetic
ccgttttttttttttgtgacatg

SEQ ID NO: 14841 - DNA, 23 bp, Artificial Sequence
  Synthetic
ccgttttttttttttgaagtgca

SEQ ID NO: 14842 - DNA, 23 bp, Artificial Sequence
  Synthetic
ccgttttttttttttactccgtg

SEQ ID NO: 14843 - DNA, 23 bp, Artificial Sequence
  Synthetic
ccgttttttttttttactcaaag

SEQ ID NO: 14844 - DNA, 23 bp, Artificial Sequence
  Synthetic
ccgttttttttttttactgaaac

SEQ ID NO: 14845 - DNA, 23 bp, Artificial Sequence
  Synthetic
ccgttttttttttttcatcatcg

SEQ ID NO: 14846 - DNA, 23 bp, Artificial Sequence
  Synthetic
ccgttttttttttttagagggag

SEQ ID NO: 14847 - DNA, 23 bp, Artificial Sequence
  Synthetic
ccgttttttttttttcacaaccc

SEQ ID NO: 14848 - DNA, 23 bp, Artificial Sequence
  Synthetic
ccgttttttttttttagggacct

SEQ ID NO: 14849 - DNA, 23 bp, Artificial Sequence
  Synthetic
ccgttttttttttttgctctcac

SEQ ID NO: 14850 - DNA, 23 bp, Artificial Sequence
  Synthetic
ccgttttttttttttgggctggg

SEQ ID NO: 14851 - DNA, 23 bp, Artificial Sequence
  Synthetic
ccgttttttttttttgtagtggg

SEQ ID NO: 14852 - DNA, 23 bp, Artificial Sequence
  Synthetic
ccgttttttttttttcatgaaca

SEQ ID NO: 14853 - DNA, 23 bp, Artificial Sequence
  Synthetic
ccgttttttttttttcatgcaca

SEQ ID NO: 14854 - DNA, 23 bp, Artificial Sequence
  Synthetic
ccgttttttttttttcacacatc

SEQ ID NO: 14855 - DNA, 23 bp, Artificial Sequence
  Synthetic
ccgttttttttttttaccacata

SEQ ID NO: 14856 - DNA, 23 bp, Artificial Sequence
  Synthetic
ccgttttttttttttctccagcc

SEQ ID NO: 14857 - DNA, 23 bp, Artificial Sequence
  Synthetic
ccgttttttttttttacacacag

SEQ ID NO: 14858 - DNA, 23 bp, Artificial Sequence
  Synthetic
ccgttttttttttttccaaggac

SEQ ID NO: 14859 - DNA, 23 bp, Artificial Sequence
  Synthetic
ccgttttttttttttcaccactc

SEQ ID NO: 14860 - DNA, 23 bp, Artificial Sequence
  Synthetic
ccgttttttttttttctgagatg

SEQ ID NO: 14861 - DNA, 23 bp, Artificial Sequence
  Synthetic
ccgttttttttttttctgagcgg

SEQ ID NO: 14862 - DNA, 23 bp, Artificial Sequence
  Synthetic
ccgttttttttttttctgtgggc

SEQ ID NO: 14863 - DNA, 23 bp, Artificial Sequence
  Synthetic
ccgttttttttttttgctcaaca

SEQ ID NO: 14864 - DNA, 23 bp, Artificial Sequence
  Synthetic
ccgttttttttttttcaagtcct

SEQ ID NO: 14865 - DNA, 23 bp, Artificial Sequence
  Synthetic
ccgttttttttttttagaagcta

SEQ ID NO: 14866 - DNA, 23 bp, Artificial Sequence
  Synthetic
ccgttttttttttttctccagtc

SEQ ID NO: 14867 - DNA, 23 bp, Artificial Sequence
  Synthetic
ccgttttttttttttccaagagt

SEQ ID NO: 14868 - DNA, 23 bp, Artificial Sequence
  Synthetic
ccgttttttttttttccccatgt

SEQ ID NO: 14869 - DNA, 23 bp, Artificial Sequence
  Synthetic
ccgttttttttttttgctgcctg

SEQ ID NO: 14870 - DNA, 23 bp, Artificial Sequence
  Synthetic
ccgttttttttttttagacttca

SEQ ID NO: 14871 - DNA, 23 bp, Artificial Sequence
  Synthetic
ccgttttttttttttaggacaca

SEQ ID NO: 14872 - DNA, 23 bp, Artificial Sequence
  Synthetic
ccgttttttttttttacttgaag

SEQ ID NO: 14873 - DNA, 23 bp, Artificial Sequence
  Synthetic
ccgttttttttttttgcctcacc

SEQ ID NO: 14874 - DNA, 23 bp, Artificial Sequence
  Synthetic
ccgttttttttttttcaccgtct

SEQ ID NO: 14875 - DNA, 23 bp, Artificial Sequence
  Synthetic
ccgttttttttttttattgctgc

SEQ ID NO: 14876 - DNA, 23 bp, Artificial Sequence
  Synthetic
ccgttttttttttttaataagta

SEQ ID NO: 14877 - DNA, 23 bp, Artificial Sequence
  Synthetic
ccgttttttttttttgaccccgc

SEQ ID NO: 14878 - DNA, 23 bp, Artificial Sequence
  Synthetic
ccgttttttttttttgttgtgag

SEQ ID NO: 14879 - DNA, 23 bp, Artificial Sequence
  Synthetic
ccgttttttttttttgcctctct

SEQ ID NO: 14880 - DNA, 23 bp, Artificial Sequence
  Synthetic
ccgttttttttttttagtgaggc

SEQ ID NO: 14881 - DNA, 23 bp, Artificial Sequence
  Synthetic
ccgttttttttttttcagccaca

SEQ ID NO: 14882 - DNA, 23 bp, Artificial Sequence
  Synthetic
ccgttttttttttttaaaacttt

SEQ ID NO: 14883 - DNA, 23 bp, Artificial Sequence
  Synthetic
ccgttttttttttttcaggcaac

SEQ ID NO: 14884 - DNA, 23 bp, Artificial Sequence
  Synthetic
ccgttttttttttttagtcacct

SEQ ID NO: 14885 - DNA, 23 bp, Artificial Sequence
  Synthetic
ccgttttttttttttccacagca

SEQ ID NO: 14886 - DNA, 23 bp, Artificial Sequence
  Synthetic
ccgttttttttttttccacagga

SEQ ID NO: 14887 - DNA, 23 bp, Artificial Sequence
  Synthetic
ccgttttttttttttgggaagga

SEQ ID NO: 14888 - DNA, 23 bp, Artificial Sequence
  Synthetic
ccgttttttttttttgagccagg

SEQ ID NO: 14889 - DNA, 23 bp, Artificial Sequence
  Synthetic
ccgttttttttttttaacaaaat

SEQ ID NO: 14890 - DNA, 23 bp, Artificial Sequence
  Synthetic
ccgttttttttttttgtggactc

SEQ ID NO: 14891 - DNA, 23 bp, Artificial Sequence
  Synthetic
ccgttttttttttttcatctatt

SEQ ID NO: 14892 - DNA, 23 bp, Artificial Sequence
  Synthetic
ccgttttttttttttagcggggt

SEQ ID NO: 14893 - DNA, 23 bp, Artificial Sequence
  Synthetic
ccgttttttttttttccttctga

SEQ ID NO: 14894 - DNA, 23 bp, Artificial Sequence
  Synthetic
ccgttttttttttttaggagcag

SEQ ID NO: 14895 - DNA, 23 bp, Artificial Sequence
  Synthetic
ccgttttttttttttcccacccc

SEQ ID NO: 14896 - DNA, 23 bp, Artificial Sequence
  Synthetic
ccgttttttttttttagacaggg

SEQ ID NO: 14897 - DNA, 23 bp, Artificial Sequence
  Synthetic
ccgttttttttttttgtaggcaa

SEQ ID NO: 14898 - DNA, 23 bp, Artificial Sequence
  Synthetic
ccgttttttttttttgaagctca

SEQ ID NO: 14899 - DNA, 23 bp, Artificial Sequence
  Synthetic
ccgttttttttttttctcctgcc

SEQ ID NO: 14900 - DNA, 23 bp, Artificial Sequence
  Synthetic
ccgttttttttttttcaactctc

SEQ ID NO: 14901 - DNA, 23 bp, Artificial Sequence
  Synthetic
ccgttttttttttttacatctct

SEQ ID NO: 14902 - DNA, 23 bp, Artificial Sequence
  Synthetic
ccgttttttttttttgtaccgcc

SEQ ID NO: 14903 - DNA, 23 bp, Artificial Sequence
  Synthetic
ccgttttttttttttaacacccg

SEQ ID NO: 14904 - DNA, 23 bp, Artificial Sequence
  Synthetic
ccgttttttttttttctgtgtgc

SEQ ID NO: 14905 - DNA, 23 bp, Artificial Sequence
  Synthetic
ccgttttttttttttcgaccgac

SEQ ID NO: 14906 - DNA, 23 bp, Artificial Sequence
  Synthetic
ccgttttttttttttacgcgggg

SEQ ID NO: 14907 - DNA, 23 bp, Artificial Sequence
  Synthetic
ccgttttttttttttgagaaggt

SEQ ID NO: 14908 - DNA, 23 bp, Artificial Sequence
  Synthetic
ccgttttttttttttgacacccg

SEQ ID NO: 14909 - DNA, 23 bp, Artificial Sequence
  Synthetic
ccgttttttttttttacattttt

SEQ ID NO: 14910 - DNA, 23 bp, Artificial Sequence
  Synthetic
ccgttttttttttttgaggcccc

SEQ ID NO: 14911 - DNA, 23 bp, Artificial Sequence
  Synthetic
ccgttttttttttttcccctttt

SEQ ID NO: 14912 - DNA, 23 bp, Artificial Sequence
  Synthetic
ccgttttttttttttctgttagc

SEQ ID NO: 14913 - DNA, 23 bp, Artificial Sequence
  Synthetic
ccgttttttttttttgtggacca

SEQ ID NO: 14914 - DNA, 23 bp, Artificial Sequence
  Synthetic
ccgttttttttttttcaaaattg

SEQ ID NO: 14915 - DNA, 23 bp, Artificial Sequence
  Synthetic
ccgttttttttttttccccacag

SEQ ID NO: 14916 - DNA, 23 bp, Artificial Sequence
  Synthetic
ccgttttttttttttgtcagttt

SEQ ID NO: 14917 - DNA, 23 bp, Artificial Sequence
  Synthetic
ccgttttttttttttctctgtcc

SEQ ID NO: 14918 - DNA, 23 bp, Artificial Sequence
  Synthetic
ccgttttttttttttccactggt

SEQ ID NO: 14919 - DNA, 23 bp, Artificial Sequence
  Synthetic
ccgttttttttttttcagttgcc

SEQ ID NO: 14920 - DNA, 23 bp, Artificial Sequence
  Synthetic
ccgttttttttttttggaggaca

SEQ ID NO: 14921 - DNA, 23 bp, Artificial Sequence
  Synthetic
ccgttttttttttttcagctcca

SEQ ID NO: 14922 - DNA, 23 bp, Artificial Sequence
  Synthetic
ccgttttttttttttacaaaatc

SEQ ID NO: 14923 - DNA, 23 bp, Artificial Sequence
  Synthetic
ccgttttttttttttcgattccg

SEQ ID NO: 14924 - DNA, 23 bp, Artificial Sequence
  Synthetic
ccgttttttttttttaggatgaa

SEQ ID NO: 14925 - DNA, 23 bp, Artificial Sequence
  Synthetic
ccgttttttttttttcaggtgag

SEQ ID NO: 14926 - DNA, 23 bp, Artificial Sequence
  Synthetic
ccgttttttttttttcctatgtc

SEQ ID NO: 14927 - DNA, 23 bp, Artificial Sequence
  Synthetic
ccgttttttttttttatacagct

SEQ ID NO: 14928 - DNA, 23 bp, Artificial Sequence
  Synthetic
ccgttttttttttttctttcggt

SEQ ID NO: 14929 - DNA, 23 bp, Artificial Sequence
  Synthetic
ccgttttttttttttaggccggg

SEQ ID NO: 14930 - DNA, 23 bp, Artificial Sequence
  Synthetic
ccgttttttttttttacctgcac

SEQ ID NO: 14931 - DNA, 23 bp, Artificial Sequence
  Synthetic
ccgttttttttttttgcaaaaat

SEQ ID NO: 14932 - DNA, 23 bp, Artificial Sequence
  Synthetic
ccgttttttttttttacaataca

SEQ ID NO: 14933 - DNA, 23 bp, Artificial Sequence
  Synthetic
ccgttttttttttttcaagatcg

SEQ ID NO: 14934 - DNA, 23 bp, Artificial Sequence
  Synthetic
ccgttttttttttttgcaaggtc

SEQ ID NO: 14935 - DNA, 23 bp, Artificial Sequence
  Synthetic
ccgttttttttttttcagttatc

SEQ ID NO: 14936 - DNA, 23 bp, Artificial Sequence
  Synthetic
ccgttttttttttttatagccct

SEQ ID NO: 14937 - DNA, 23 bp, Artificial Sequence
  Synthetic
ccgttttttttttttcaggagtc

SEQ ID NO: 14938 - DNA, 23 bp, Artificial Sequence
  Synthetic
ccgttttttttttttctacctgc

SEQ ID NO: 14939 - DNA, 23 bp, Artificial Sequence
  Synthetic
ccgttttttttttttctgcactg

SEQ ID NO: 14940 - DNA, 23 bp, Artificial Sequence
  Synthetic
ccgttttttttttttatagccct

SEQ ID NO: 14941 - DNA, 23 bp, Artificial Sequence
  Synthetic
ccgttttttttttttcaaattcg

SEQ ID NO: 14942 - DNA, 23 bp, Artificial Sequence
  Synthetic
ccgttttttttttttacaagtta

SEQ ID NO: 14943 - DNA, 23 bp, Artificial Sequence
  Synthetic
ccgttttttttttttgccaagct

SEQ ID NO: 14944 - DNA, 23 bp, Artificial Sequence
  Synthetic
ccgttttttttttttccctttta

SEQ ID NO: 14945 - DNA, 23 bp, Artificial Sequence
  Synthetic
ccgttttttttttttcagctggt

SEQ ID NO: 14946 - DNA, 23 bp, Artificial Sequence
  Synthetic
ccgttttttttttttcctctggt

SEQ ID NO: 14947 - DNA, 23 bp, Artificial Sequence
  Synthetic
ccgttttttttttttaccatagg

SEQ ID NO: 14948 - DNA, 23 bp, Artificial Sequence
  Synthetic
ccgttttttttttttagtacatc

SEQ ID NO: 14949 - DNA, 23 bp, Artificial Sequence
  Synthetic
ccgttttttttttttagggattc

SEQ ID NO: 14950 - DNA, 23 bp, Artificial Sequence
  Synthetic
ccgttttttttttttcagaagca

SEQ ID NO: 14951 - DNA, 23 bp, Artificial Sequence
  Synthetic
ccgttttttttttttacttttgt

SEQ ID NO: 14952 - DNA, 23 bp, Artificial Sequence
  Synthetic
ccgttttttttttttgaaggcaa

SEQ ID NO: 14953 - DNA, 23 bp, Artificial Sequence
  Synthetic
ccgttttttttttttacaaacca

SEQ ID NO: 14954 - DNA, 23 bp, Artificial Sequence
  Synthetic
ccgttttttttttttaaaccatg

SEQ ID NO: 14955 - DNA, 23 bp, Artificial Sequence
  Synthetic
ccgttttttttttttgccaatat

SEQ ID NO: 14956 - DNA, 23 bp, Artificial Sequence
  Synthetic
ccgttttttttttttcaagtgcc

SEQ ID NO: 14957 - DNA, 23 bp, Artificial Sequence
  Synthetic
ccgttttttttttttctacctgc

SEQ ID NO: 14958 - DNA, 23 bp, Artificial Sequence
  Synthetic
ccgttttttttttttctgcacta

SEQ ID NO: 14959 - DNA, 23 bp, Artificial Sequence
  Synthetic
ccgttttttttttttctcaccga

SEQ ID NO: 14960 - DNA, 23 bp, Artificial Sequence
  Synthetic
ccgttttttttttttgtacaatc

SEQ ID NO: 14961 - DNA, 23 bp, Artificial Sequence
  Synthetic
ccgttttttttttttacccaccg

SEQ ID NO: 14962 - DNA, 23 bp, Artificial Sequence
  Synthetic
ccgttttttttttttagtgaatt

SEQ ID NO: 14963 - DNA, 23 bp, Artificial Sequence
  Synthetic
ccgttttttttttttcccttatc

SEQ ID NO: 14964 - DNA, 23 bp, Artificial Sequence
  Synthetic
ccgttttttttttttggctgcaa

SEQ ID NO: 14965 - DNA, 23 bp, Artificial Sequence
  Synthetic
ccgttttttttttttccctccac

SEQ ID NO: 14966 - DNA, 23 bp, Artificial Sequence
  Synthetic
ccgttttttttttttctgatatc

SEQ ID NO: 14967 - DNA, 23 bp, Artificial Sequence
  Synthetic
ccgttttttttttttcacatgga

SEQ ID NO: 14968 - DNA, 23 bp, Artificial Sequence
  Synthetic
ccgttttttttttttccgggtgg

SEQ ID NO: 14969 - DNA, 23 bp, Artificial Sequence
  Synthetic
ccgttttttttttttctatttcc

SEQ ID NO: 14970 - DNA, 23 bp, Artificial Sequence
  Synthetic
ccgttttttttttttaacaggta

SEQ ID NO: 14971 - DNA, 23 bp, Artificial Sequence
  Synthetic
ccgttttttttttttagttttgc

SEQ ID NO: 14972 - DNA, 23 bp, Artificial Sequence
  Synthetic
ccgttttttttttttagttttgc

SEQ ID NO: 14973 - DNA, 23 bp, Artificial Sequence
  Synthetic
ccgttttttttttttcctgcact

SEQ ID NO: 14974 - DNA, 23 bp, Artificial Sequence
  Synthetic
ccgttttttttttttggcatagg

SEQ ID NO: 14975 - DNA, 23 bp, Artificial Sequence
  Synthetic
ccgttttttttttttagactccg

SEQ ID NO: 14976 - DNA, 23 bp, Artificial Sequence
  Synthetic
ccgttttttttttttcacacact

SEQ ID NO: 14977 - DNA, 23 bp, Artificial Sequence
  Synthetic
ccgttttttttttttaacatcag

SEQ ID NO: 14978 - DNA, 23 bp, Artificial Sequence
  Synthetic
ccgttttttttttttggcgaagg

SEQ ID NO: 14979 - DNA, 23 bp, Artificial Sequence
  Synthetic
ccgttttttttttttgcctgtct

SEQ ID NO: 14980 - DNA, 23 bp, Artificial Sequence
  Synthetic
ccgttttttttttttctgtcaat

SEQ ID NO: 14981 - DNA, 23 bp, Artificial Sequence
  Synthetic
ccgttttttttttttcatggtta

SEQ ID NO: 14982 - DNA, 23 bp, Artificial Sequence
  Synthetic
ccgttttttttttttcagttctt

SEQ ID NO: 14983 - DNA, 23 bp, Artificial Sequence
  Synthetic
ccgttttttttttttaagtgtca

SEQ ID NO: 14984 - DNA, 23 bp, Artificial Sequence
  Synthetic
ccgttttttttttttaacggaac

SEQ ID NO: 14985 - DNA, 23 bp, Artificial Sequence
  Synthetic
ccgttttttttttttgaaatccc

SEQ ID NO: 14986 - DNA, 23 bp, Artificial Sequence
  Synthetic
ccgttttttttttttgttcctgc

SEQ ID NO: 14987 - DNA, 23 bp, Artificial Sequence
  Synthetic
ccgttttttttttttagaccgag

SEQ ID NO: 14988 - DNA, 23 bp, Artificial Sequence
  Synthetic
ccgttttttttttttgcctatcc

SEQ ID NO: 14989 - DNA, 23 bp, Artificial Sequence
  Synthetic
ccgttttttttttttgcggaact

SEQ ID NO: 14990 - DNA, 23 bp, Artificial Sequence
  Synthetic
ccgttttttttttttcaatagac

SEQ ID NO: 14991 - DNA, 23 bp, Artificial Sequence
  Synthetic
ccgttttttttttttaccgattt

SEQ ID NO: 14992 - DNA, 23 bp, Artificial Sequence
  Synthetic
ccgttttttttttttctgatttc

SEQ ID NO: 14993 - DNA, 23 bp, Artificial Sequence
  Synthetic
ccgttttttttttttctgagtgt

SEQ ID NO: 14994 - DNA, 23 bp, Artificial Sequence
  Synthetic
ccgttttttttttttctgagagt

SEQ ID NO: 14995 - DNA, 23 bp, Artificial Sequence
  Synthetic
ccgttttttttttttccagtcgg

SEQ ID NO: 14996 - DNA, 23 bp, Artificial Sequence
  Synthetic
ccgttttttttttttagctatgc

SEQ ID NO: 14997 - DNA, 23 bp, Artificial Sequence
  Synthetic
ccgttttttttttttcaacttag

SEQ ID NO: 14998 - DNA, 23 bp, Artificial Sequence
  Synthetic
ccgttttttttttttaatgcaac

SEQ ID NO: 14999 - DNA, 23 bp, Artificial Sequence
  Synthetic
ccgttttttttttttcaaccagc

SEQ ID NO: 15000 - DNA, 23 bp, Artificial Sequence
  Synthetic
ccgttttttttttttacaaaatc

SEQ ID NO: 15001 - DNA, 23 bp, Artificial Sequence
  Synthetic
ccgttttttttttttatacagct

SEQ ID NO: 15002 - DNA, 23 bp, Artificial Sequence
  Synthetic
ccgttttttttttttcaggccgg

SEQ ID NO: 15003 - DNA, 23 bp, Artificial Sequence
  Synthetic
ccgttttttttttttacctgcac

SEQ ID NO: 15004 - DNA, 23 bp, Artificial Sequence
  Synthetic
ccgttttttttttttcaaaaatg

SEQ ID NO: 15005 - DNA, 23 bp, Artificial Sequence
  Synthetic
ccgttttttttttttacaagatc

SEQ ID NO: 15006 - DNA, 23 bp, Artificial Sequence
  Synthetic
ccgttttttttttttgctctctc

SEQ ID NO: 15007 - DNA, 23 bp, Artificial Sequence
  Synthetic
ccgttttttttttttgcatacag

SEQ ID NO: 15008 - DNA, 23 bp, Artificial Sequence
  Synthetic
ccgttttttttttttggatgcag

SEQ ID NO: 15009 - DNA, 23 bp, Artificial Sequence
  Synthetic
ccgttttttttttttgggaatga

SEQ ID NO: 15010 - DNA, 23 bp, Artificial Sequence
  Synthetic
ccgttttttttttttggcaagtc

SEQ ID NO: 15011 - DNA, 23 bp, Artificial Sequence
  Synthetic
ccgttttttttttttggcaagtc

SEQ ID NO: 15012 - DNA, 23 bp, Artificial Sequence
  Synthetic
ccgttttttttttttatattggc

SEQ ID NO: 15013 - DNA, 23 bp, Artificial Sequence
  Synthetic
ccgttttttttttttggagctcc

SEQ ID NO: 15014 - DNA, 23 bp, Artificial Sequence
  Synthetic
ccgttttttttttttatcaatgc

SEQ ID NO: 15015 - DNA, 23 bp, Artificial Sequence
  Synthetic
ccgttttttttttttagttcccc

SEQ ID NO: 15016 - DNA, 23 bp, Artificial Sequence
  Synthetic
ccgttttttttttttagttcccc

SEQ ID NO: 15017 - DNA, 23 bp, Artificial Sequence
  Synthetic
ccgttttttttttttagttcccc

SEQ ID NO: 15018 - DNA, 23 bp, Artificial Sequence
  Synthetic
ccgttttttttttttagttcccc

SEQ ID NO: 15019 - DNA, 23 bp, Artificial Sequence
  Synthetic
ccgttttttttttttagttcccc

SEQ ID NO: 15020 - DNA, 23 bp, Artificial Sequence
  Synthetic
ccgttttttttttttagttcccc

SEQ ID NO: 15021 - DNA, 23 bp, Artificial Sequence
  Synthetic
ccgttttttttttttagttcccc

SEQ ID NO: 15022 - DNA, 23 bp, Artificial Sequence
  Synthetic
ccgttttttttttttagttcccc

SEQ ID NO: 15023 - DNA, 23 bp, Artificial Sequence
  Synthetic
ccgttttttttttttagttcccc

SEQ ID NO: 15024 - DNA, 23 bp, Artificial Sequence
  Synthetic
ccgttttttttttttagttcccc

SEQ ID NO: 15025 - DNA, 23 bp, Artificial Sequence
  Synthetic
ccgttttttttttttagttcccc

SEQ ID NO: 15026 - DNA, 23 bp, Artificial Sequence
  Synthetic
ccgttttttttttttagttcccc

SEQ ID NO: 15027 - DNA, 23 bp, Artificial Sequence
  Synthetic
ccgttttttttttttagttcccc

SEQ ID NO: 15028 - DNA, 23 bp, Artificial Sequence
  Synthetic
ccgttttttttttttagttcccc

SEQ ID NO: 15029 - DNA, 23 bp, Artificial Sequence
  Synthetic
ccgttttttttttttagttcccc

SEQ ID NO: 15030 - DNA, 23 bp, Artificial Sequence
  Synthetic
ccgttttttttttttagttcccc

SEQ ID NO: 15031 - DNA, 23 bp, Artificial Sequence
  Synthetic
ccgttttttttttttgggcaaat

SEQ ID NO: 15032 - DNA, 23 bp, Artificial Sequence
  Synthetic
ccgttttttttttttagggcagc

SEQ ID NO: 15033 - DNA, 23 bp, Artificial Sequence
  Synthetic
ccgttttttttttttagggcaaa

SEQ ID NO: 15034 - DNA, 23 bp, Artificial Sequence
  Synthetic
ccgttttttttttttgggcagct

SEQ ID NO: 15035 - DNA, 23 bp, Artificial Sequence
  Synthetic
ccgttttttttttttgggcaaat

SEQ ID NO: 15036 - DNA, 23 bp, Artificial Sequence
  Synthetic
ccgttttttttttttgccaagct

SEQ ID NO: 15037 - DNA, 23 bp, Artificial Sequence
  Synthetic
ccgttttttttttttcatcatca

SEQ ID NO: 15038 - DNA, 23 bp, Artificial Sequence
  Synthetic
ccgttttttttttttctgcatga

SEQ ID NO: 15039 - DNA, 23 bp, Artificial Sequence
  Synthetic
ccgttttttttttttcacccaat

SEQ ID NO: 15040 - DNA, 23 bp, Artificial Sequence
  Synthetic
ccgttttttttttttgctcactc

SEQ ID NO: 15041 - DNA, 23 bp, Artificial Sequence
  Synthetic
ccgttttttttttttgctcactc

SEQ ID NO: 15042 - DNA, 23 bp, Artificial Sequence
  Synthetic
ccgttttttttttttgctcactc

SEQ ID NO: 15043 - DNA, 23 bp, Artificial Sequence
  Synthetic
ccgttttttttttttgctcactc

SEQ ID NO: 15044 - DNA, 23 bp, Artificial Sequence
  Synthetic
ccgttttttttttttgctcactc

SEQ ID NO: 15045 - DNA, 23 bp, Artificial Sequence
  Synthetic
ccgttttttttttttgctcactc

SEQ ID NO: 15046 - DNA, 23 bp, Artificial Sequence
  Synthetic
ccgttttttttttttgctcactc

SEQ ID NO: 15047 - DNA, 23 bp, Artificial Sequence
  Synthetic
ccgttttttttttttgctcactc

SEQ ID NO: 15048 - DNA, 23 bp, Artificial Sequence
  Synthetic
ccgttttttttttttgctcactc

SEQ ID NO: 15049 - DNA, 23 bp, Artificial Sequence
  Synthetic
ccgttttttttttttgctcactc

SEQ ID NO: 15050 - DNA, 23 bp, Artificial Sequence
  Synthetic
ccgttttttttttttgctctctc

SEQ ID NO: 15051 - DNA, 23 bp, Artificial Sequence
  Synthetic
ccgttttttttttttgctcactc

SEQ ID NO: 15052 - DNA, 23 bp, Artificial Sequence
  Synthetic
ccgttttttttttttagagctcc

SEQ ID NO: 15053 - DNA, 23 bp, Artificial Sequence
  Synthetic
ccgttttttttttttagagctcc

SEQ ID NO: 15054 - DNA, 23 bp, Artificial Sequence
  Synthetic
ccgttttttttttttgagctccc

SEQ ID NO: 15055 - DNA, 23 bp, Artificial Sequence
  Synthetic
ccgttttttttttttggagctcc

SEQ ID NO: 15056 - DNA, 23 bp, Artificial Sequence
  Synthetic
ccgttttttttttttggagctcc

SEQ ID NO: 15057 - DNA, 23 bp, Artificial Sequence
  Synthetic
ccgttttttttttttgagctccc

SEQ ID NO: 15058 - DNA, 23 bp, Artificial Sequence
  Synthetic
ccgttttttttttttgcatacag

SEQ ID NO: 15059 - DNA, 23 bp, Artificial Sequence
  Synthetic
ccgttttttttttttgcatacag

SEQ ID NO: 15060 - DNA, 23 bp, Artificial Sequence
  Synthetic
ccgttttttttttttgcatacag

SEQ ID NO: 15061 - DNA, 23 bp, Artificial Sequence
  Synthetic
ccgttttttttttttgcatacag

SEQ ID NO: 15062 - DNA, 23 bp, Artificial Sequence
  Synthetic
ccgttttttttttttggcataca

SEQ ID NO: 15063 - DNA, 23 bp, Artificial Sequence
  Synthetic
ccgttttttttttttgcattcag

SEQ ID NO: 15064 - DNA, 23 bp, Artificial Sequence
  Synthetic
ccgttttttttttttggatgcag

SEQ ID NO: 15065 - DNA, 23 bp, Artificial Sequence
  Synthetic
ccgttttttttttttggatgcag

SEQ ID NO: 15066 - DNA, 23 bp, Artificial Sequence
  Synthetic
ccgttttttttttttcacgtgcc

SEQ ID NO: 15067 - DNA, 23 bp, Artificial Sequence
  Synthetic
ccgttttttttttttcacgtgcc

SEQ ID NO: 15068 - DNA, 23 bp, Artificial Sequence
  Synthetic
ccgttttttttttttcacgtacc

SEQ ID NO: 15069 - DNA, 23 bp, Artificial Sequence
  Synthetic
ccgttttttttttttgcacgtgc

SEQ ID NO: 15070 - DNA, 23 bp, Artificial Sequence
  Synthetic
ccgttttttttttttcacgtgcc

SEQ ID NO: 15071 - DNA, 23 bp, Artificial Sequence
  Synthetic
ccgttttttttttttcacgtgcc

SEQ ID NO: 15072 - DNA, 23 bp, Artificial Sequence
  Synthetic
ccgttttttttttttgggaatga

SEQ ID NO: 15073 - DNA, 23 bp, Artificial Sequence
  Synthetic
ccgttttttttttttgggaatga

SEQ ID NO: 15074 - DNA, 23 bp, Artificial Sequence
  Synthetic
ccgttttttttttttgggaatga

SEQ ID NO: 15075 - DNA, 23 bp, Artificial Sequence
  Synthetic
ccgttttttttttttgggaatga

SEQ ID NO: 15076 - DNA, 23 bp, Artificial Sequence
  Synthetic
ccgttttttttttttgggaatga

SEQ ID NO: 15077 - DNA, 23 bp, Artificial Sequence
  Synthetic
ccgttttttttttttgggaatga

SEQ ID NO: 15078 - DNA, 23 bp, Artificial Sequence
  Synthetic
ccgttttttttttttaggaatga

SEQ ID NO: 15079 - DNA, 23 bp, Artificial Sequence
  Synthetic
ccgttttttttttttaggaatga

SEQ ID NO: 15080 - DNA, 23 bp, Artificial Sequence
  Synthetic
ccgttttttttttttaggaatga

SEQ ID NO: 15081 - DNA, 23 bp, Artificial Sequence
  Synthetic
ccgttttttttttttaggaatga

SEQ ID NO: 15082 - DNA, 23 bp, Artificial Sequence
  Synthetic
ccgttttttttttttgggattga

SEQ ID NO: 15083 - DNA, 23 bp, Artificial Sequence
  Synthetic
ccgttttttttttttgggattga

SEQ ID NO: 15084 - DNA, 23 bp, Artificial Sequence
  Synthetic
ccgttttttttttttgggaatga

SEQ ID NO: 15085 - DNA, 23 bp, Artificial Sequence
  Synthetic
ccgttttttttttttgggaatga

SEQ ID NO: 15086 - DNA, 23 bp, Artificial Sequence
  Synthetic
ccgttttttttttttgatcatgc

SEQ ID NO: 15087 - DNA, 23 bp, Artificial Sequence
  Synthetic
ccgttttttttttttgatcatgc

SEQ ID NO: 15088 - DNA, 23 bp, Artificial Sequence
  Synthetic
ccgttttttttttttgatcatgc

SEQ ID NO: 15089 - DNA, 23 bp, Artificial Sequence
  Synthetic
ccgttttttttttttagatcatg

SEQ ID NO: 15090 - DNA, 23 bp, Artificial Sequence
  Synthetic
ccgttttttttttttagatcatg

SEQ ID NO: 15091 - DNA, 23 bp, Artificial Sequence
  Synthetic
ccgttttttttttttagatcatg

SEQ ID NO: 15092 - DNA, 23 bp, Artificial Sequence
  Synthetic
ccgttttttttttttagatcatg

SEQ ID NO: 15093 - DNA, 23 bp, Artificial Sequence
  Synthetic
ccgttttttttttttagatcatg

SEQ ID NO: 15094 - DNA, 23 bp, Artificial Sequence
  Synthetic
ccgttttttttttttagatcatg

SEQ ID NO: 15095 - DNA, 23 bp, Artificial Sequence
  Synthetic
ccgttttttttttttagatcatg

SEQ ID NO: 15096 - DNA, 23 bp, Artificial Sequence
  Synthetic
ccgttttttttttttcccgatct

SEQ ID NO: 15097 - DNA, 23 bp, Artificial Sequence
  Synthetic
ccgttttttttttttccgagctg

SEQ ID NO: 15098 - DNA, 23 bp, Artificial Sequence
  Synthetic
ccgttttttttttttggcaagtc

SEQ ID NO: 15099 - DNA, 23 bp, Artificial Sequence
  Synthetic
ccgttttttttttttcggcaagt

SEQ ID NO: 15100 - DNA, 23 bp, Artificial Sequence
  Synthetic
ccgttttttttttttcggcaagt

SEQ ID NO: 15101 - DNA, 23 bp, Artificial Sequence
  Synthetic
ccgttttttttttttcggcaatt

SEQ ID NO: 15102 - DNA, 23 bp, Artificial Sequence
  Synthetic
ccgttttttttttttcggcaagt

SEQ ID NO: 15103 - DNA, 23 bp, Artificial Sequence
  Synthetic
ccgttttttttttttggcaagtc

SEQ ID NO: 15104 - DNA, 23 bp, Artificial Sequence
  Synthetic
ccgttttttttttttggcaagtc

SEQ ID NO: 15105 - DNA, 23 bp, Artificial Sequence
  Synthetic
ccgttttttttttttaggcaagt

SEQ ID NO: 15106 - DNA, 23 bp, Artificial Sequence
  Synthetic
ccgttttttttttttaggcaagt

SEQ ID NO: 15107 - DNA, 23 bp, Artificial Sequence
  Synthetic
ccgttttttttttttaggcaagt

SEQ ID NO: 15108 - DNA, 23 bp, Artificial Sequence
  Synthetic
ccgttttttttttttaggcaagt

SEQ ID NO: 15109 - DNA, 23 bp, Artificial Sequence
  Synthetic
ccgttttttttttttaggcaagt

SEQ ID NO: 15110 - DNA, 23 bp, Artificial Sequence
  Synthetic
ccgttttttttttttaggcaagt

SEQ ID NO: 15111 - DNA, 23 bp, Artificial Sequence
  Synthetic
ccgttttttttttttggcaagtc

SEQ ID NO: 15112 - DNA, 23 bp, Artificial Sequence
  Synthetic
ccgttttttttttttggcaagtc

SEQ ID NO: 15113 - DNA, 23 bp, Artificial Sequence
  Synthetic
ccgttttttttttttcggcaagt

SEQ ID NO: 15114 - DNA, 23 bp, Artificial Sequence
  Synthetic
ccgttttttttttttatgggcag

SEQ ID NO: 15115 - DNA, 23 bp, Artificial Sequence
  Synthetic
ccgttttttttttttatattggc

SEQ ID NO: 15116 - DNA, 23 bp, Artificial Sequence
  Synthetic
ccgttttttttttttatattggc

SEQ ID NO: 15117 - DNA, 23 bp, Artificial Sequence
  Synthetic
ccgttttttttttttatattggc

SEQ ID NO: 15118 - DNA, 23 bp, Artificial Sequence
  Synthetic
ccgttttttttttttatattggc

SEQ ID NO: 15119 - DNA, 23 bp, Artificial Sequence
  Synthetic
ccgttttttttttttatattggc

SEQ ID NO: 15120 - DNA, 23 bp, Artificial Sequence
  Synthetic
ccgttttttttttttatattggc

SEQ ID NO: 15121 - DNA, 23 bp, Artificial Sequence
  Synthetic
ccgttttttttttttatattggc

SEQ ID NO: 15122 - DNA, 23 bp, Artificial Sequence
  Synthetic
ccgttttttttttttgtgatatt

SEQ ID NO: 15123 - DNA, 23 bp, Artificial Sequence
  Synthetic
ccgttttttttttttatattgac

SEQ ID NO: 15124 - DNA, 23 bp, Artificial Sequence
  Synthetic
ccgttttttttttttgcagcatc

SEQ ID NO: 15125 - DNA, 23 bp, Artificial Sequence
  Synthetic
ccgttttttttttttgcagcatc

SEQ ID NO: 15126 - DNA, 23 bp, Artificial Sequence
  Synthetic
ccgttttttttttttgcagcatc

SEQ ID NO: 15127 - DNA, 23 bp, Artificial Sequence
  Synthetic
ccgttttttttttttgcagcatc

SEQ ID NO: 15128 - DNA, 23 bp, Artificial Sequence
  Synthetic
ccgttttttttttttggagcacc

SEQ ID NO: 15129 - DNA, 23 bp, Artificial Sequence
  Synthetic
ccgttttttttttttggagcacc

SEQ ID NO: 15130 - DNA, 23 bp, Artificial Sequence
  Synthetic
ccgttttttttttttgcgctatc

SEQ ID NO: 15131 - DNA, 23 bp, Artificial Sequence
  Synthetic
ccgttttttttttttatcaatgc

SEQ ID NO: 15132 - DNA, 23 bp, Artificial Sequence
  Synthetic
ccgttttttttttttgatcaatg

SEQ ID NO: 15133 - DNA, 23 bp, Artificial Sequence
  Synthetic
ccgttttttttttttgaggtgga

SEQ ID NO: 15134 - DNA, 23 bp, Artificial Sequence
  Synthetic
ccgttttttttttttagttcccc

SEQ ID NO: 15135 - DNA, 23 bp, Artificial Sequence
  Synthetic
ccgttttttttttttagttcccc

SEQ ID NO: 15136 - DNA, 23 bp, Artificial Sequence
  Synthetic
ccgttttttttttttagttcctc

SEQ ID NO: 15137 - DNA, 23 bp, Artificial Sequence
  Synthetic
ccgttttttttttttagttcccc

SEQ ID NO: 15138 - DNA, 23 bp, Artificial Sequence
  Synthetic
ccgttttttttttttagttcccc

SEQ ID NO: 15139 - DNA, 23 bp, Artificial Sequence
  Synthetic
ccgttttttttttttagttcccc

SEQ ID NO: 15140 - DNA, 23 bp, Artificial Sequence
  Synthetic
ccgttttttttttttagttcccc

SEQ ID NO: 15141 - DNA, 23 bp, Artificial Sequence
  Synthetic
ccgttttttttttttagttcccc

SEQ ID NO: 15142 - DNA, 23 bp, Artificial Sequence
  Synthetic
ccgttttttttttttagttcccc

SEQ ID NO: 15143 - DNA, 23 bp, Artificial Sequence
  Synthetic
ccgttttttttttttagttcccc

SEQ ID NO: 15144 - DNA, 23 bp, Artificial Sequence
  Synthetic
ccgttttttttttttagttcccc

SEQ ID NO: 15145 - DNA, 23 bp, Artificial Sequence
  Synthetic
ccgttttttttttttagttcccc

SEQ ID NO: 15146 - DNA, 23 bp, Artificial Sequence
  Synthetic
ccgttttttttttttagttcccc

SEQ ID NO: 15147 - DNA, 23 bp, Artificial Sequence
  Synthetic
ccgttttttttttttagttcccc

SEQ ID NO: 15148 - DNA, 23 bp, Artificial Sequence
  Synthetic
ccgttttttttttttagttcctc

SEQ ID NO: 15149 - DNA, 23 bp, Artificial Sequence
  Synthetic
ccgttttttttttttagttcccc

SEQ ID NO: 15150 - DNA, 23 bp, Artificial Sequence
  Synthetic
ccgttttttttttttagttcccc

SEQ ID NO: 15151 - DNA, 23 bp, Artificial Sequence
  Synthetic
ccgttttttttttttagttcccc

SEQ ID NO: 15152 - DNA, 23 bp, Artificial Sequence
  Synthetic
ccgttttttttttttagttcccc

SEQ ID NO: 15153 - DNA, 23 bp, Artificial Sequence
  Synthetic
ccgttttttttttttagtttccc

SEQ ID NO: 15154 - DNA, 23 bp, Artificial Sequence
  Synthetic
ccgttttttttttttatttcccc

SEQ ID NO: 15155 - DNA, 23 bp, Artificial Sequence
  Synthetic
ccgttttttttttttagttccgc

SEQ ID NO: 15156 - DNA, 23 bp, Artificial Sequence
  Synthetic
ccgttttttttttttagaatccc

SEQ ID NO: 15157 - DNA, 23 bp, Artificial Sequence
  Synthetic
ccgttttttttttttagttcaag

SEQ ID NO: 15158 - DNA, 23 bp, Artificial Sequence
  Synthetic
ccgttttttttttttagttcaag

SEQ ID NO: 15159 - DNA, 23 bp, Artificial Sequence
  Synthetic
ccgttttttttttttagttcaag

SEQ ID NO: 15160 - DNA, 23 bp, Artificial Sequence
  Synthetic
ccgttttttttttttagttcaag

SEQ ID NO: 15161 - DNA, 23 bp, Artificial Sequence
  Synthetic
ccgttttttttttttagttcaag

SEQ ID NO: 15162 - DNA, 23 bp, Artificial Sequence
  Synthetic
ccgttttttttttttatcaacgc

SEQ ID NO: 15163 - DNA, 23 bp, Artificial Sequence
  Synthetic
ccgttttttttttttatcaacgc

SEQ ID NO: 15164 - DNA, 23 bp, Artificial Sequence
  Synthetic
ccgttttttttttttaggggtga

SEQ ID NO: 15165 - DNA, 23 bp, Artificial Sequence
  Synthetic
ccgttttttttttttaggggcga

SEQ ID NO: 15166 - DNA, 23 bp, Artificial Sequence
  Synthetic
ccgttttttttttttagggcaat

SEQ ID NO: 15167 - DNA, 23 bp, Artificial Sequence
  Synthetic
ccgttttttttttttagggcaat

SEQ ID NO: 15168 - DNA, 23 bp, Artificial Sequence
  Synthetic
ccgttttttttttttagggcaat

SEQ ID NO: 15169 - DNA, 23 bp, Artificial Sequence
  Synthetic
ccgttttttttttttagggcaac

SEQ ID NO: 15170 - DNA, 23 bp, Artificial Sequence
  Synthetic
ccgttttttttttttgggcaaat

SEQ ID NO: 15171 - DNA, 23 bp, Artificial Sequence
  Synthetic
ccgttttttttttttgggcaaat

SEQ ID NO: 15172 - DNA, 23 bp, Artificial Sequence
  Synthetic
ccgttttttttttttgggcaaat

SEQ ID NO: 15173 - DNA, 23 bp, Artificial Sequence
  Synthetic
ccgttttttttttttgggcaagt

SEQ ID NO: 15174 - DNA, 23 bp, Artificial Sequence
  Synthetic
ccgttttttttttttagggcagc

SEQ ID NO: 15175 - DNA, 23 bp, Artificial Sequence
  Synthetic
ccgttttttttttttgggcaact

SEQ ID NO: 15176 - DNA, 23 bp, Artificial Sequence
  Synthetic
ccgttttttttttttggggcaaa

SEQ ID NO: 15177 - DNA, 23 bp, Artificial Sequence
  Synthetic
ccgttttttttttttccagggaa

SEQ ID NO: 15178 - DNA, 23 bp, Artificial Sequence
  Synthetic
ccgttttttttttttgcagaaca

SEQ ID NO: 15179 - DNA, 23 bp, Artificial Sequence
  Synthetic
ccgttttttttttttgacgatga

SEQ ID NO: 15180 - DNA, 23 bp, Artificial Sequence
  Synthetic
ccgttttttttttttgctctgct

SEQ ID NO: 15181 - DNA, 23 bp, Artificial Sequence
  Synthetic
ccgttttttttttttaacagtgt

SEQ ID NO: 15182 - DNA, 23 bp, Artificial Sequence
  Synthetic
ccgttttttttttttgaacaaat

SEQ ID NO: 15183 - DNA, 23 bp, Artificial Sequence
  Synthetic
ccgttttttttttttgtcatttc

SEQ ID NO: 15184 - DNA, 23 bp, Artificial Sequence
  Synthetic
ccgttttttttttttaacatcgt

SEQ ID NO: 15185 - DNA, 23 bp, Artificial Sequence
  Synthetic
ccgttttttttttttcatttccg

SEQ ID NO: 15186 - DNA, 23 bp, Artificial Sequence
  Synthetic
ccgttttttttttttgtaaggac

SEQ ID NO: 15187 - DNA, 23 bp, Artificial Sequence
  Synthetic
ccgttttttttttttaactccaa

SEQ ID NO: 15188 - DNA, 23 bp, Artificial Sequence
  Synthetic
ccgttttttttttttagtcaaac

SEQ ID NO: 15189 - DNA, 23 bp, Artificial Sequence
  Synthetic
ccgttttttttttttactataac

SEQ ID NO: 15190 - DNA, 23 bp, Artificial Sequence
  Synthetic
ccgttttttttttttgaacaacc

SEQ ID NO: 15191 - DNA, 23 bp, Artificial Sequence
  Synthetic
ccgttttttttttttgaacaacc

SEQ ID NO: 15192 - DNA, 23 bp, Artificial Sequence
  Synthetic
ccgttttttttttttgaacaacc

SEQ ID NO: 15193 - DNA, 23 bp, Artificial Sequence
  Synthetic
ccgttttttttttttgaacaacc

SEQ ID NO: 15194 - DNA, 23 bp, Artificial Sequence
  Synthetic
ccgttttttttttttgaacaacc

SEQ ID NO: 15195 - DNA, 23 bp, Artificial Sequence
  Synthetic
ccgttttttttttttgaacaacc

SEQ ID NO: 15196 - DNA, 23 bp, Artificial Sequence
  Synthetic
ccgttttttttttttgaacaacc

SEQ ID NO: 15197 - DNA, 23 bp, Artificial Sequence
  Synthetic
ccgttttttttttttgaacaacc

SEQ ID NO: 15198 - DNA, 23 bp, Artificial Sequence
  Synthetic
ccgttttttttttttgaacaacc

SEQ ID NO: 15199 - DNA, 23 bp, Artificial Sequence
  Synthetic
ccgttttttttttttgaacaacc

SEQ ID NO: 15200 - DNA, 23 bp, Artificial Sequence
  Synthetic
ccgttttttttttttcccgatca

SEQ ID NO: 15201 - DNA, 23 bp, Artificial Sequence
  Synthetic
ccgttttttttttttccacattt

SEQ ID NO: 15202 - DNA, 23 bp, Artificial Sequence
  Synthetic
ccgttttttttttttccacattt

SEQ ID NO: 15203 - DNA, 23 bp, Artificial Sequence
  Synthetic
ccgttttttttttttccacattt

SEQ ID NO: 15204 - DNA, 23 bp, Artificial Sequence
  Synthetic
ccgttttttttttttcgtctcgc

SEQ ID NO: 15205 - DNA, 23 bp, Artificial Sequence
  Synthetic
ccgttttttttttttcagattta

SEQ ID NO: 15206 - DNA, 23 bp, Artificial Sequence
  Synthetic
ccgttttttttttttcagcaagc

SEQ ID NO: 15207 - DNA, 23 bp, Artificial Sequence
  Synthetic
ccgttttttttttttcggatgtt

SEQ ID NO: 15208 - DNA, 23 bp, Artificial Sequence
  Synthetic
ccgttttttttttttcggatgtt

SEQ ID NO: 15209 - DNA, 23 bp, Artificial Sequence
  Synthetic
ccgttttttttttttcggatgtt

SEQ ID NO: 15210 - DNA, 23 bp, Artificial Sequence
  Synthetic
ccgttttttttttttcggatgtt

SEQ ID NO: 15211 - DNA, 23 bp, Artificial Sequence
  Synthetic
ccgttttttttttttcggatgtt

SEQ ID NO: 15212 - DNA, 23 bp, Artificial Sequence
  Synthetic
ccgttttttttttttcggatgtt

SEQ ID NO: 15213 - DNA, 23 bp, Artificial Sequence
  Synthetic
ccgttttttttttttcggatgtt

SEQ ID NO: 15214 - DNA, 23 bp, Artificial Sequence
  Synthetic
ccgttttttttttttcggatgtt

SEQ ID NO: 15215 - DNA, 23 bp, Artificial Sequence
  Synthetic
ccgttttttttttttcggatgtt

SEQ ID NO: 15216 - DNA, 23 bp, Artificial Sequence
  Synthetic
ccgttttttttttttcatttccc

SEQ ID NO: 15217 - DNA, 23 bp, Artificial Sequence
  Synthetic
ccgttttttttttttcctctgca

SEQ ID NO: 15218 - DNA, 23 bp, Artificial Sequence
  Synthetic
ccgttttttttttttaagaagag

SEQ ID NO: 15219 - DNA, 23 bp, Artificial Sequence
  Synthetic
ccgttttttttttttgcatctgc

SEQ ID NO: 15220 - DNA, 23 bp, Artificial Sequence
  Synthetic
ccgttttttttttttggcggcac

SEQ ID NO: 15221 - DNA, 23 bp, Artificial Sequence
  Synthetic
ccgttttttttttttcgtgctct

SEQ ID NO: 15222 - DNA, 23 bp, Artificial Sequence
  Synthetic
ccgttttttttttttaccgttga

SEQ ID NO: 15223 - DNA, 23 bp, Artificial Sequence
  Synthetic
ccgttttttttttttaccgttga

SEQ ID NO: 15224 - DNA, 23 bp, Artificial Sequence
  Synthetic
ccgttttttttttttaccgttga

SEQ ID NO: 15225 - DNA, 23 bp, Artificial Sequence
  Synthetic
ccgttttttttttttaccgttga

SEQ ID NO: 15226 - DNA, 23 bp, Artificial Sequence
  Synthetic
ccgttttttttttttaccgttga

SEQ ID NO: 15227 - DNA, 23 bp, Artificial Sequence
  Synthetic
ccgttttttttttttaccgttga

SEQ ID NO: 15228 - DNA, 23 bp, Artificial Sequence
  Synthetic
ccgttttttttttttaccgttga

SEQ ID NO: 15229 - DNA, 23 bp, Artificial Sequence
  Synthetic
ccgttttttttttttaccgttga

SEQ ID NO: 15230 - DNA, 23 bp, Artificial Sequence
  Synthetic
ccgttttttttttttgattcacc

SEQ ID NO: 15231 - DNA, 23 bp, Artificial Sequence
  Synthetic
ccgttttttttttttgattcacc

SEQ ID NO: 15232 - DNA, 23 bp, Artificial Sequence
  Synthetic
ccgttttttttttttgattcacc

SEQ ID NO: 15233 - DNA, 23 bp, Artificial Sequence
  Synthetic
ccgttttttttttttacatttcc

SEQ ID NO: 15234 - DNA, 23 bp, Artificial Sequence
  Synthetic
ccgttttttttttttctaacatt

SEQ ID NO: 15235 - DNA, 23 bp, Artificial Sequence
  Synthetic
ccgttttttttttttctaacatt

SEQ ID NO: 15236 - DNA, 23 bp, Artificial Sequence
  Synthetic
ccgttttttttttttctaacatt

SEQ ID NO: 15237 - DNA, 23 bp, Artificial Sequence
  Synthetic
ccgttttttttttttctaacatt

SEQ ID NO: 15238 - DNA, 23 bp, Artificial Sequence
  Synthetic
ccgttttttttttttctaacatt

SEQ ID NO: 15239 - DNA, 23 bp, Artificial Sequence
  Synthetic
ccgttttttttttttctaacatt

SEQ ID NO: 15240 - DNA, 23 bp, Artificial Sequence
  Synthetic
ccgttttttttttttctaacatt

SEQ ID NO: 15241 - DNA, 23 bp, Artificial Sequence
  Synthetic
ccgttttttttttttctaacatt

SEQ ID NO: 15242 - DNA, 23 bp, Artificial Sequence
  Synthetic
ccgttttttttttttcacatgtg

SEQ ID NO: 15243 - DNA, 23 bp, Artificial Sequence
  Synthetic
ccgttttttttttttcgtccatt

SEQ ID NO: 15244 - DNA, 23 bp, Artificial Sequence
  Synthetic
ccgttttttttttttcgtccatt

SEQ ID NO: 15245 - DNA, 23 bp, Artificial Sequence
  Synthetic
ccgttttttttttttcgtccatt

SEQ ID NO: 15246 - DNA, 23 bp, Artificial Sequence
  Synthetic
ccgttttttttttttccaacgtt

SEQ ID NO: 15247 - DNA, 23 bp, Artificial Sequence
  Synthetic
ccgttttttttttttccaacgtt

SEQ ID NO: 15248 - DNA, 23 bp, Artificial Sequence
  Synthetic
ccgttttttttttttccaacgtt

SEQ ID NO: 15249 - DNA, 23 bp, Artificial Sequence
  Synthetic
ccgttttttttttttccaacgtt

SEQ ID NO: 15250 - DNA, 23 bp, Artificial Sequence
  Synthetic
ccgttttttttttttccaacgtt

SEQ ID NO: 15251 - DNA, 23 bp, Artificial Sequence
  Synthetic
ccgttttttttttttgtaaaacc

SEQ ID NO: 15252 - DNA, 23 bp, Artificial Sequence
  Synthetic
ccgttttttttttttgattcgtt

SEQ ID NO: 15253 - DNA, 23 bp, Artificial Sequence
  Synthetic
ccgttttttttttttgattcgtt

SEQ ID NO: 15254 - DNA, 23 bp, Artificial Sequence
  Synthetic
ccgttttttttttttgattcgtt

SEQ ID NO: 15255 - DNA, 23 bp, Artificial Sequence
  Synthetic
ccgttttttttttttccaatctc

SEQ ID NO: 15256 - DNA, 23 bp, Artificial Sequence
  Synthetic
ccgttttttttttttccaatctc

SEQ ID NO: 15257 - DNA, 23 bp, Artificial Sequence
  Synthetic
ccgttttttttttttccaatctc

SEQ ID NO: 15258 - DNA, 23 bp, Artificial Sequence
  Synthetic
ccgttttttttttttgtagtaaa

SEQ ID NO: 15259 - DNA, 23 bp, Artificial Sequence
  Synthetic
ccgttttttttttttaatcgggc

SEQ ID NO: 15260 - DNA, 23 bp, Artificial Sequence
  Synthetic
ccgttttttttttttcgtcccat

SEQ ID NO: 15261 - DNA, 23 bp, Artificial Sequence
  Synthetic
ccgttttttttttttcgtcccat

SEQ ID NO: 15262 - DNA, 23 bp, Artificial Sequence
  Synthetic
ccgttttttttttttcgtcccat

SEQ ID NO: 15263 - DNA, 23 bp, Artificial Sequence
  Synthetic
ccgttttttttttttcgtcccat

SEQ ID NO: 15264 - DNA, 23 bp, Artificial Sequence
  Synthetic
ccgttttttttttttcgtcccat

SEQ ID NO: 15265 - DNA, 23 bp, Artificial Sequence
  Synthetic
ccgttttttttttttctagaaag

SEQ ID NO: 15266 - DNA, 23 bp, Artificial Sequence
  Synthetic
ccgttttttttttttctagaaag

SEQ ID NO: 15267 - DNA, 23 bp, Artificial Sequence
  Synthetic
ccgttttttttttttctagaaag

SEQ ID NO: 15268 - DNA, 23 bp, Artificial Sequence
  Synthetic
ccgttttttttttttctagaaag

SEQ ID NO: 15269 - DNA, 23 bp, Artificial Sequence
  Synthetic
ccgttttttttttttctagaaag

SEQ ID NO: 15270 - DNA, 23 bp, Artificial Sequence
  Synthetic
ccgttttttttttttctagaaag

SEQ ID NO: 15271 - DNA, 23 bp, Artificial Sequence
  Synthetic
ccgttttttttttttctagaaag

SEQ ID NO: 15272 - DNA, 23 bp, Artificial Sequence
  Synthetic
ccgttttttttttttctagaaag

SEQ ID NO: 15273 - DNA, 23 bp, Artificial Sequence
  Synthetic
ccgttttttttttttctagaaag

SEQ ID NO: 15274 - DNA, 23 bp, Artificial Sequence
  Synthetic
ccgttttttttttttctagaaag

SEQ ID NO: 15275 - DNA, 23 bp, Artificial Sequence
  Synthetic
ccgttttttttttttctagaaag

SEQ ID NO: 15276 - DNA, 23 bp, Artificial Sequence
  Synthetic
ccgttttttttttttctggtcca

SEQ ID NO: 15277 - DNA, 23 bp, Artificial Sequence
  Synthetic
ccgttttttttttttctggtcca

SEQ ID NO: 15278 - DNA, 23 bp, Artificial Sequence
  Synthetic
ccgttttttttttttctggtcca

SEQ ID NO: 15279 - DNA, 23 bp, Artificial Sequence
  Synthetic
ccgttttttttttttcaactttt

SEQ ID NO: 15280 - DNA, 23 bp, Artificial Sequence
  Synthetic
ccgttttttttttttcaactttt

SEQ ID NO: 15281 - DNA, 23 bp, Artificial Sequence
  Synthetic
ccgttttttttttttcaactttt

SEQ ID NO: 15282 - DNA, 23 bp, Artificial Sequence
  Synthetic
ccgttttttttttttcatacttc

SEQ ID NO: 15283 - DNA, 23 bp, Artificial Sequence
  Synthetic
ccgttttttttttttacaagttc

SEQ ID NO: 15284 - DNA, 23 bp, Artificial Sequence
  Synthetic
ccgttttttttttttcagttatc

SEQ ID NO: 15285 - DNA, 23 bp, Artificial Sequence
  Synthetic
ccgttttttttttttatagccct

SEQ ID NO: 15286 - DNA, 23 bp, Artificial Sequence
  Synthetic
ccgttttttttttttcaggagtc

SEQ ID NO: 15287 - DNA, 23 bp, Artificial Sequence
  Synthetic
ccgttttttttttttctacctgc

SEQ ID NO: 15288 - DNA, 23 bp, Artificial Sequence
  Synthetic
ccgttttttttttttctgcactg

SEQ ID NO: 15289 - DNA, 23 bp, Artificial Sequence
  Synthetic
ccgttttttttttttatagccct

SEQ ID NO: 15290 - DNA, 23 bp, Artificial Sequence
  Synthetic
ccgttttttttttttacaaattc

SEQ ID NO: 15291 - DNA, 23 bp, Artificial Sequence
  Synthetic
ccgttttttttttttcaaattcg

SEQ ID NO: 15292 - DNA, 23 bp, Artificial Sequence
  Synthetic
ccgttttttttttttgcattcac

SEQ ID NO: 15293 - DNA, 23 bp, Artificial Sequence
  Synthetic
ccgttttttttttttacaagtta

SEQ ID NO: 15294 - DNA, 23 bp, Artificial Sequence
  Synthetic
ccgttttttttttttaaagagac

SEQ ID NO: 15295 - DNA, 23 bp, Artificial Sequence
  Synthetic
ccgttttttttttttccctttta

SEQ ID NO: 15296 - DNA, 23 bp, Artificial Sequence
  Synthetic
ccgttttttttttttcagctggt

SEQ ID NO: 15297 - DNA, 23 bp, Artificial Sequence
  Synthetic
ccgttttttttttttcctctggt

SEQ ID NO: 15298 - DNA, 23 bp, Artificial Sequence
  Synthetic
ccgttttttttttttacatagga

SEQ ID NO: 15299 - DNA, 23 bp, Artificial Sequence
  Synthetic
ccgttttttttttttcatcatca

SEQ ID NO: 15300 - DNA, 23 bp, Artificial Sequence
  Synthetic
ccgttttttttttttgacacgtg

SEQ ID NO: 15301 - DNA, 23 bp, Artificial Sequence
  Synthetic
ccgttttttttttttcatcttta

SEQ ID NO: 15302 - DNA, 23 bp, Artificial Sequence
  Synthetic
ccgttttttttttttagctacag

SEQ ID NO: 15303 - DNA, 23 bp, Artificial Sequence
  Synthetic
ccgttttttttttttagtacatc

SEQ ID NO: 15304 - DNA, 23 bp, Artificial Sequence
  Synthetic
ccgttttttttttttcagaagca

SEQ ID NO: 15305 - DNA, 23 bp, Artificial Sequence
  Synthetic
ccgttttttttttttgaaggcaa

SEQ ID NO: 15306 - DNA, 23 bp, Artificial Sequence
  Synthetic
ccgttttttttttttacaaacca

SEQ ID NO: 15307 - DNA, 23 bp, Artificial Sequence
  Synthetic
ccgttttttttttttaaaccatg

SEQ ID NO: 15308 - DNA, 23 bp, Artificial Sequence
  Synthetic
ccgttttttttttttgccaatat

SEQ ID NO: 15309 - DNA, 23 bp, Artificial Sequence
  Synthetic
ccgttttttttttttcaagtgcc

SEQ ID NO: 15310 - DNA, 23 bp, Artificial Sequence
  Synthetic
ccgttttttttttttctacctgc

SEQ ID NO: 15311 - DNA, 23 bp, Artificial Sequence
  Synthetic
ccgttttttttttttctgcacta

SEQ ID NO: 15312 - DNA, 23 bp, Artificial Sequence
  Synthetic
ccgttttttttttttctcaccga

SEQ ID NO: 15313 - DNA, 23 bp, Artificial Sequence
  Synthetic
ccgttttttttttttgtacaatc

SEQ ID NO: 15314 - DNA, 23 bp, Artificial Sequence
  Synthetic
ccgttttttttttttacccaccg

SEQ ID NO: 15315 - DNA, 23 bp, Artificial Sequence
  Synthetic
ccgttttttttttttctcaccga

SEQ ID NO: 15316 - DNA, 23 bp, Artificial Sequence
  Synthetic
ccgttttttttttttagtgaatt

SEQ ID NO: 15317 - DNA, 23 bp, Artificial Sequence
  Synthetic
ccgttttttttttttagcccaaa

SEQ ID NO: 15318 - DNA, 23 bp, Artificial Sequence
  Synthetic
ccgttttttttttttggctgcaa

SEQ ID NO: 15319 - DNA, 23 bp, Artificial Sequence
  Synthetic
ccgttttttttttttccctccac

SEQ ID NO: 15320 - DNA, 23 bp, Artificial Sequence
  Synthetic
ccgttttttttttttctgatatc

SEQ ID NO: 15321 - DNA, 23 bp, Artificial Sequence
  Synthetic
ccgttttttttttttcctaatat

SEQ ID NO: 15322 - DNA, 23 bp, Artificial Sequence
  Synthetic
ccgttttttttttttccaatatt

SEQ ID NO: 15323 - DNA, 23 bp, Artificial Sequence
  Synthetic
ccgttttttttttttccaacaac

SEQ ID NO: 15324 - DNA, 23 bp, Artificial Sequence
  Synthetic
ccgttttttttttttctgggtgg

SEQ ID NO: 15325 - DNA, 23 bp, Artificial Sequence
  Synthetic
ccgttttttttttttctatctcc

SEQ ID NO: 15326 - DNA, 23 bp, Artificial Sequence
  Synthetic
ccgttttttttttttaacaggta

SEQ ID NO: 15327 - DNA, 23 bp, Artificial Sequence
  Synthetic
ccgttttttttttttagttttgc

SEQ ID NO: 15328 - DNA, 23 bp, Artificial Sequence
  Synthetic
ccgttttttttttttagttttgc

SEQ ID NO: 15329 - DNA, 23 bp, Artificial Sequence
  Synthetic
ccgttttttttttttcctgcact

SEQ ID NO: 15330 - DNA, 23 bp, Artificial Sequence
  Synthetic
ccgttttttttttttggcatagg

SEQ ID NO: 15331 - DNA, 23 bp, Artificial Sequence
  Synthetic
ccgttttttttttttagactccg

SEQ ID NO: 15332 - DNA, 23 bp, Artificial Sequence
  Synthetic
ccgttttttttttttaacatcag

SEQ ID NO: 15333 - DNA, 23 bp, Artificial Sequence
  Synthetic
ccgttttttttttttgcctgtct

SEQ ID NO: 15334 - DNA, 23 bp, Artificial Sequence
  Synthetic
ccgttttttttttttacagttgc

SEQ ID NO: 15335 - DNA, 23 bp, Artificial Sequence
  Synthetic
ccgttttttttttttccaatcag

SEQ ID NO: 15336 - DNA, 23 bp, Artificial Sequence
  Synthetic
ccgttttttttttttcatggtta

SEQ ID NO: 15337 - DNA, 23 bp, Artificial Sequence
  Synthetic
ccgttttttttttttcagttctt

SEQ ID NO: 15338 - DNA, 23 bp, Artificial Sequence
  Synthetic
ccgttttttttttttaagtgtca

SEQ ID NO: 15339 - DNA, 23 bp, Artificial Sequence
  Synthetic
ccgttttttttttttaaacccag

SEQ ID NO: 15340 - DNA, 23 bp, Artificial Sequence
  Synthetic
ccgttttttttttttgggtattt

SEQ ID NO: 15341 - DNA, 23 bp, Artificial Sequence
  Synthetic
ccgttttttttttttaacggaac

SEQ ID NO: 15342 - DNA, 23 bp, Artificial Sequence
  Synthetic
ccgttttttttttttgaaatccc

SEQ ID NO: 15343 - DNA, 23 bp, Artificial Sequence
  Synthetic
ccgttttttttttttggtaatcc

SEQ ID NO: 15344 - DNA, 23 bp, Artificial Sequence
  Synthetic
ccgttttttttttttgttcctgc

SEQ ID NO: 15345 - DNA, 23 bp, Artificial Sequence
  Synthetic
ccgttttttttttttagaccgag

SEQ ID NO: 15346 - DNA, 23 bp, Artificial Sequence
  Synthetic
ccgttttttttttttgcctatcc

SEQ ID NO: 15347 - DNA, 23 bp, Artificial Sequence
  Synthetic
ccgttttttttttttgcggaact

SEQ ID NO: 15348 - DNA, 23 bp, Artificial Sequence
  Synthetic
ccgttttttttttttcaatagac

SEQ ID NO: 15349 - DNA, 23 bp, Artificial Sequence
  Synthetic
ccgttttttttttttaccgattt

SEQ ID NO: 15350 - DNA, 23 bp, Artificial Sequence
  Synthetic
ccgttttttttttttctgatttc

SEQ ID NO: 15351 - DNA, 23 bp, Artificial Sequence
  Synthetic
ccgttttttttttttctgcaaac

SEQ ID NO: 15352 - DNA, 23 bp, Artificial Sequence
  Synthetic
ccgttttttttttttccagtcga

SEQ ID NO: 15353 - DNA, 23 bp, Artificial Sequence
  Synthetic
ccgttttttttttttctgagtgt

SEQ ID NO: 15354 - DNA, 23 bp, Artificial Sequence
  Synthetic
ccgttttttttttttccagtcgg

SEQ ID NO: 15355 - DNA, 23 bp, Artificial Sequence
  Synthetic
ccgttttttttttttagctatgc

SEQ ID NO: 15356 - DNA, 23 bp, Artificial Sequence
  Synthetic
ccgttttttttttttcaacttag

SEQ ID NO: 15357 - DNA, 23 bp, Artificial Sequence
  Synthetic
ccgttttttttttttaatgcaac

SEQ ID NO: 15358 - DNA, 23 bp, Artificial Sequence
  Synthetic
ccgttttttttttttcaaccagc

SEQ ID NO: 15359 - DNA, 23 bp, Artificial Sequence
  Synthetic
ccgttttttttttttacaaaatc

SEQ ID NO: 15360 - DNA, 23 bp, Artificial Sequence
  Synthetic
ccgttttttttttttcaggccgg

SEQ ID NO: 15361 - DNA, 23 bp, Artificial Sequence
  Synthetic
ccgttttttttttttacctgcac

SEQ ID NO: 15362 - DNA, 23 bp, Artificial Sequence
  Synthetic
ccgttttttttttttctcaataa

SEQ ID NO: 15363 - DNA, 23 bp, Artificial Sequence
  Synthetic
ccgttttttttttttcaaaaatg

SEQ ID NO: 15364 - DNA, 23 bp, Artificial Sequence
  Synthetic
ccgttttttttttttacaataca

SEQ ID NO: 15365 - DNA, 23 bp, Artificial Sequence
  Synthetic
ccgttttttttttttacaagatc

SEQ ID NO: 15366 - DNA, 23 bp, Artificial Sequence
  Synthetic
ccgttttttttttttctctccca

SEQ ID NO: 15367 - DNA, 23 bp, Artificial Sequence
  Synthetic
ccgttttttttttttgcataacc

SEQ ID NO: 15368 - DNA, 23 bp, Artificial Sequence
  Synthetic
ccgttttttttttttgcattcta

SEQ ID NO: 15369 - DNA, 23 bp, Artificial Sequence
  Synthetic
ccgttttttttttttcccacgaa

SEQ ID NO: 15370 - DNA, 23 bp, Artificial Sequence
  Synthetic
ccgttttttttttttgccgcgag

SEQ ID NO: 15371 - DNA, 23 bp, Artificial Sequence
  Synthetic
ccgttttttttttttgtatacag

SEQ ID NO: 15372 - DNA, 23 bp, Artificial Sequence
  Synthetic
ccgttttttttttttatacaagc

SEQ ID NO: 15373 - DNA, 23 bp, Artificial Sequence
  Synthetic
ccgttttttttttttgacatcat

SEQ ID NO: 15374 - DNA, 23 bp, Artificial Sequence
  Synthetic
ccgttttttttttttagaggcct

SEQ ID NO: 15375 - DNA, 23 bp, Artificial Sequence
  Synthetic
ccgttttttttttttagctagtg

SEQ ID NO: 15376 - DNA, 23 bp, Artificial Sequence
  Synthetic
ccgttttttttttttagctagtg

SEQ ID NO: 15377 - DNA, 23 bp, Artificial Sequence
  Synthetic
ccgttttttttttttagctagtg

SEQ ID NO: 15378 - DNA, 23 bp, Artificial Sequence
  Synthetic
ccgttttttttttttagctagtg

SEQ ID NO: 15379 - DNA, 23 bp, Artificial Sequence
  Synthetic
ccgttttttttttttgaactcct

SEQ ID NO: 15380 - DNA, 23 bp, Artificial Sequence
  Synthetic
ccgttttttttttttgaactcct

SEQ ID NO: 15381 - DNA, 23 bp, Artificial Sequence
  Synthetic
ccgttttttttttttaccctgca

SEQ ID NO: 15382 - DNA, 23 bp, Artificial Sequence
  Synthetic
ccgttttttttttttaccaatga

SEQ ID NO: 15383 - DNA, 23 bp, Artificial Sequence
  Synthetic
ccgttttttttttttgaggtgta

SEQ ID NO: 15384 - DNA, 23 bp, Artificial Sequence
  Synthetic
ccgttttttttttttgctcactc

SEQ ID NO: 15385 - DNA, 23 bp, Artificial Sequence
  Synthetic
ccgttttttttttttgagctccc

SEQ ID NO: 15386 - DNA, 23 bp, Artificial Sequence
  Synthetic
ccgttttttttttttgagctccc

SEQ ID NO: 15387 - DNA, 23 bp, Artificial Sequence
  Synthetic
ccgttttttttttttggagctcc

SEQ ID NO: 15388 - DNA, 23 bp, Artificial Sequence
  Synthetic
ccgttttttttttttggagctcc

SEQ ID NO: 15389 - DNA, 23 bp, Artificial Sequence
  Synthetic
ccgttttttttttttgcgctatc

SEQ ID NO: 15390 - DNA, 23 bp, Artificial Sequence
  Synthetic
ccgttttttttttttgcgctatc

SEQ ID NO: 15391 - DNA, 23 bp, Artificial Sequence
  Synthetic
ccgttttttttttttgcgctatc

SEQ ID NO: 15392 - DNA, 23 bp, Artificial Sequence
  Synthetic
ccgttttttttttttcctcacag

SEQ ID NO: 15393 - DNA, 23 bp, Artificial Sequence
  Synthetic
ccgttttttttttttcctcacag

SEQ ID NO: 15394 - DNA, 23 bp, Artificial Sequence
  Synthetic
ccgttttttttttttatgcaact

SEQ ID NO: 15395 - DNA, 23 bp, Artificial Sequence
  Synthetic
ccgttttttttttttcgtgctct

SEQ ID NO: 15396 - DNA, 23 bp, Artificial Sequence
  Synthetic
ccgttttttttttttcgtgctct

SEQ ID NO: 15397 - DNA, 23 bp, Artificial Sequence
  Synthetic
ccgttttttttttttcgtgctct

SEQ ID NO: 15398 - DNA, 23 bp, Artificial Sequence
  Synthetic
ccgttttttttttttgcgtgctc

SEQ ID NO: 15399 - DNA, 23 bp, Artificial Sequence
  Synthetic
ccgttttttttttttgcacacag

SEQ ID NO: 15400 - DNA, 23 bp, Artificial Sequence
  Synthetic
ccgttttttttttttgcctgtag

SEQ ID NO: 15401 - DNA, 23 bp, Artificial Sequence
  Synthetic
ccgttttttttttttgcctgtag

SEQ ID NO: 15402 - DNA, 23 bp, Artificial Sequence
  Synthetic
ccgttttttttttttcagacata

SEQ ID NO: 15403 - DNA, 23 bp, Artificial Sequence
  Synthetic
ccgttttttttttttcagacata

SEQ ID NO: 15404 - DNA, 23 bp, Artificial Sequence
  Synthetic
ccgttttttttttttcagacata

SEQ ID NO: 15405 - DNA, 23 bp, Artificial Sequence
  Synthetic
ccgttttttttttttacaagttc

SEQ ID NO: 15406 - DNA, 23 bp, Artificial Sequence
  Synthetic
ccgttttttttttttcagttatc

SEQ ID NO: 15407 - DNA, 23 bp, Artificial Sequence
  Synthetic
ccgttttttttttttatagccct

SEQ ID NO: 15408 - DNA, 23 bp, Artificial Sequence
  Synthetic
ccgttttttttttttcaggagtc

SEQ ID NO: 15409 - DNA, 23 bp, Artificial Sequence
  Synthetic
ccgttttttttttttctacctgc

SEQ ID NO: 15410 - DNA, 23 bp, Artificial Sequence
  Synthetic
ccgttttttttttttctgcactg

SEQ ID NO: 15411 - DNA, 23 bp, Artificial Sequence
  Synthetic
ccgttttttttttttatagccct

SEQ ID NO: 15412 - DNA, 23 bp, Artificial Sequence
  Synthetic
ccgttttttttttttacaaattc

SEQ ID NO: 15413 - DNA, 23 bp, Artificial Sequence
  Synthetic
ccgttttttttttttgcattcac

SEQ ID NO: 15414 - DNA, 23 bp, Artificial Sequence
  Synthetic
ccgttttttttttttacaagtta

SEQ ID NO: 15415 - DNA, 23 bp, Artificial Sequence
  Synthetic
ccgttttttttttttgccaagct

SEQ ID NO: 15416 - DNA, 23 bp, Artificial Sequence
  Synthetic
ccgttttttttttttaaagagac

SEQ ID NO: 15417 - DNA, 23 bp, Artificial Sequence
  Synthetic
ccgttttttttttttcagctggt

SEQ ID NO: 15418 - DNA, 23 bp, Artificial Sequence
  Synthetic
ccgttttttttttttcctctggt

SEQ ID NO: 15419 - DNA, 23 bp, Artificial Sequence
  Synthetic
ccgttttttttttttacatagga

SEQ ID NO: 15420 - DNA, 23 bp, Artificial Sequence
  Synthetic
ccgttttttttttttcatcatca

SEQ ID NO: 15421 - DNA, 23 bp, Artificial Sequence
  Synthetic
ccgttttttttttttcatcttta

SEQ ID NO: 15422 - DNA, 23 bp, Artificial Sequence
  Synthetic
ccgttttttttttttagctacag

SEQ ID NO: 15423 - DNA, 23 bp, Artificial Sequence
  Synthetic
ccgttttttttttttagtacatc

SEQ ID NO: 15424 - DNA, 23 bp, Artificial Sequence
  Synthetic
ccgttttttttttttagggattc

SEQ ID NO: 15425 - DNA, 23 bp, Artificial Sequence
  Synthetic
ccgttttttttttttcagaagca

SEQ ID NO: 15426 - DNA, 23 bp, Artificial Sequence
  Synthetic
ccgttttttttttttacttttgt

SEQ ID NO: 15427 - DNA, 23 bp, Artificial Sequence
  Synthetic
ccgttttttttttttgaaggcaa

SEQ ID NO: 15428 - DNA, 23 bp, Artificial Sequence
  Synthetic
ccgttttttttttttacaaacca

SEQ ID NO: 15429 - DNA, 23 bp, Artificial Sequence
  Synthetic
ccgttttttttttttaaaccatg

SEQ ID NO: 15430 - DNA, 23 bp, Artificial Sequence
  Synthetic
ccgttttttttttttgccaatat

SEQ ID NO: 15431 - DNA, 23 bp, Artificial Sequence
  Synthetic
ccgttttttttttttcaagtgcc

SEQ ID NO: 15432 - DNA, 23 bp, Artificial Sequence
  Synthetic
ccgttttttttttttctacctgc

SEQ ID NO: 15433 - DNA, 23 bp, Artificial Sequence
  Synthetic
ccgttttttttttttctgcacta

SEQ ID NO: 15434 - DNA, 23 bp, Artificial Sequence
  Synthetic
ccgttttttttttttctcaccga

SEQ ID NO: 15435 - DNA, 23 bp, Artificial Sequence
  Synthetic
ccgttttttttttttgtacaatc

SEQ ID NO: 15436 - DNA, 23 bp, Artificial Sequence
  Synthetic
ccgttttttttttttacccaccg

SEQ ID NO: 15437 - DNA, 23 bp, Artificial Sequence
  Synthetic
ccgttttttttttttgagttcta

SEQ ID NO: 15438 - DNA, 23 bp, Artificial Sequence
  Synthetic
ccgttttttttttttcccttatc

SEQ ID NO: 15439 - DNA, 23 bp, Artificial Sequence
  Synthetic
ccgttttttttttttggctgcaa

SEQ ID NO: 15440 - DNA, 23 bp, Artificial Sequence
  Synthetic
ccgttttttttttttccctccac

SEQ ID NO: 15441 - DNA, 23 bp, Artificial Sequence
  Synthetic
ccgttttttttttttctgatatc

SEQ ID NO: 15442 - DNA, 23 bp, Artificial Sequence
  Synthetic
ccgttttttttttttcacatgga

SEQ ID NO: 15443 - DNA, 23 bp, Artificial Sequence
  Synthetic
ccgttttttttttttcaacaaca

SEQ ID NO: 15444 - DNA, 23 bp, Artificial Sequence
  Synthetic
ccgttttttttttttccaacaac

SEQ ID NO: 15445 - DNA, 23 bp, Artificial Sequence
  Synthetic
ccgttttttttttttctgggtgg

SEQ ID NO: 15446 - DNA, 23 bp, Artificial Sequence
  Synthetic
ccgttttttttttttctatctcc

SEQ ID NO: 15447 - DNA, 23 bp, Artificial Sequence
  Synthetic
ccgttttttttttttaacaggta

SEQ ID NO: 15448 - DNA, 23 bp, Artificial Sequence
  Synthetic
ccgttttttttttttagttttgc

SEQ ID NO: 15449 - DNA, 23 bp, Artificial Sequence
  Synthetic
ccgttttttttttttagttttgc

SEQ ID NO: 15450 - DNA, 23 bp, Artificial Sequence
  Synthetic
ccgttttttttttttcctgcact

SEQ ID NO: 15451 - DNA, 23 bp, Artificial Sequence
  Synthetic
ccgttttttttttttcatcatta

SEQ ID NO: 15452 - DNA, 23 bp, Artificial Sequence
  Synthetic
ccgttttttttttttggcatagg

SEQ ID NO: 15453 - DNA, 23 bp, Artificial Sequence
  Synthetic
ccgttttttttttttcacacact

SEQ ID NO: 15454 - DNA, 23 bp, Artificial Sequence
  Synthetic
ccgttttttttttttaacatcag

SEQ ID NO: 15455 - DNA, 23 bp, Artificial Sequence
  Synthetic
ccgttttttttttttggcgaagg

SEQ ID NO: 15456 - DNA, 23 bp, Artificial Sequence
  Synthetic
ccgttttttttttttgcctgtct

SEQ ID NO: 15457 - DNA, 23 bp, Artificial Sequence
  Synthetic
ccgttttttttttttctgtcaat

SEQ ID NO: 15458 - DNA, 23 bp, Artificial Sequence
  Synthetic
ccgttttttttttttacagttgc

SEQ ID NO: 15459 - DNA, 23 bp, Artificial Sequence
  Synthetic
ccgttttttttttttcatggtta

SEQ ID NO: 15460 - DNA, 23 bp, Artificial Sequence
  Synthetic
ccgttttttttttttgaattgcg

SEQ ID NO: 15461 - DNA, 23 bp, Artificial Sequence
  Synthetic
ccgttttttttttttcagttctt

SEQ ID NO: 15462 - DNA, 23 bp, Artificial Sequence
  Synthetic
ccgttttttttttttaaacccag

SEQ ID NO: 15463 - DNA, 23 bp, Artificial Sequence
  Synthetic
ccgttttttttttttgggtattt

SEQ ID NO: 15464 - DNA, 23 bp, Artificial Sequence
  Synthetic
ccgttttttttttttaacggaac

SEQ ID NO: 15465 - DNA, 23 bp, Artificial Sequence
  Synthetic
ccgttttttttttttgaaatccc

SEQ ID NO: 15466 - DNA, 23 bp, Artificial Sequence
  Synthetic
ccgttttttttttttggtaatcc

SEQ ID NO: 15467 - DNA, 23 bp, Artificial Sequence
  Synthetic
ccgttttttttttttgttcctgc

SEQ ID NO: 15468 - DNA, 23 bp, Artificial Sequence
  Synthetic
ccgttttttttttttagaccgag

SEQ ID NO: 15469 - DNA, 23 bp, Artificial Sequence
  Synthetic
ccgttttttttttttgcctatcc

SEQ ID NO: 15470 - DNA, 23 bp, Artificial Sequence
  Synthetic
ccgttttttttttttgcggaact

SEQ ID NO: 15471 - DNA, 23 bp, Artificial Sequence
  Synthetic
ccgttttttttttttcaatagac

SEQ ID NO: 15472 - DNA, 23 bp, Artificial Sequence
  Synthetic
ccgttttttttttttaccgattt

SEQ ID NO: 15473 - DNA, 23 bp, Artificial Sequence
  Synthetic
ccgttttttttttttctgatttc

SEQ ID NO: 15474 - DNA, 23 bp, Artificial Sequence
  Synthetic
ccgttttttttttttctgcaaac

SEQ ID NO: 15475 - DNA, 23 bp, Artificial Sequence
  Synthetic
ccgttttttttttttccagtcga

SEQ ID NO: 15476 - DNA, 23 bp, Artificial Sequence
  Synthetic
ccgttttttttttttagctatgc

SEQ ID NO: 15477 - DNA, 23 bp, Artificial Sequence
  Synthetic
ccgttttttttttttcaacttag

SEQ ID NO: 15478 - DNA, 23 bp, Artificial Sequence
  Synthetic
ccgttttttttttttaatgcaac

SEQ ID NO: 15479 - DNA, 23 bp, Artificial Sequence
  Synthetic
ccgttttttttttttcaaccagc

SEQ ID NO: 15480 - DNA, 23 bp, Artificial Sequence
  Synthetic
ccgttttttttttttacaaaatc

SEQ ID NO: 15481 - DNA, 23 bp, Artificial Sequence
  Synthetic
ccgttttttttttttcaggccgg

SEQ ID NO: 15482 - DNA, 23 bp, Artificial Sequence
  Synthetic
ccgttttttttttttacctgcac

SEQ ID NO: 15483 - DNA, 23 bp, Artificial Sequence
  Synthetic
ccgttttttttttttctcaataa

SEQ ID NO: 15484 - DNA, 23 bp, Artificial Sequence
  Synthetic
ccgttttttttttttacaataca

SEQ ID NO: 15485 - DNA, 23 bp, Artificial Sequence
  Synthetic
ccgttttttttttttacaagatc

SEQ ID NO: 15486 - DNA, 23 bp, Artificial Sequence
  Synthetic
ccgttttttttttttgctcactc

SEQ ID NO: 15487 - DNA, 23 bp, Artificial Sequence
  Synthetic
ccgttttttttttttgctcactc

SEQ ID NO: 15488 - DNA, 23 bp, Artificial Sequence
  Synthetic
ccgttttttttttttgctcactc

SEQ ID NO: 15489 - DNA, 23 bp, Artificial Sequence
  Synthetic
ccgttttttttttttgctcactc

SEQ ID NO: 15490 - DNA, 23 bp, Artificial Sequence
  Synthetic
ccgttttttttttttgctcactc

SEQ ID NO: 15491 - DNA, 23 bp, Artificial Sequence
  Synthetic
ccgttttttttttttgctcactc

SEQ ID NO: 15492 - DNA, 23 bp, Artificial Sequence
  Synthetic
ccgttttttttttttgctctcta

SEQ ID NO: 15493 - DNA, 23 bp, Artificial Sequence
  Synthetic
ccgttttttttttttgctctcta

SEQ ID NO: 15494 - DNA, 23 bp, Artificial Sequence
  Synthetic
ccgttttttttttttgctctcta

SEQ ID NO: 15495 - DNA, 23 bp, Artificial Sequence
  Synthetic
ccgttttttttttttgctctcta

SEQ ID NO: 15496 - DNA, 23 bp, Artificial Sequence
  Synthetic
ccgttttttttttttgctccctc

SEQ ID NO: 15497 - DNA, 23 bp, Artificial Sequence
  Synthetic
ccgttttttttttttgagctccc

SEQ ID NO: 15498 - DNA, 23 bp, Artificial Sequence
  Synthetic
ccgttttttttttttgagctccc

SEQ ID NO: 15499 - DNA, 23 bp, Artificial Sequence
  Synthetic
ccgttttttttttttgagctccc

SEQ ID NO: 15500 - DNA, 23 bp, Artificial Sequence
  Synthetic
ccgttttttttttttggagctcc

SEQ ID NO: 15501 - DNA, 23 bp, Artificial Sequence
  Synthetic
ccgttttttttttttggagctcc

SEQ ID NO: 15502 - DNA, 23 bp, Artificial Sequence
  Synthetic
ccgttttttttttttgagctccc

SEQ ID NO: 15503 - DNA, 23 bp, Artificial Sequence
  Synthetic
ccgttttttttttttgcatacag

SEQ ID NO: 15504 - DNA, 23 bp, Artificial Sequence
  Synthetic
ccgttttttttttttgcatacag

SEQ ID NO: 15505 - DNA, 23 bp, Artificial Sequence
  Synthetic
ccgttttttttttttgcatacag

SEQ ID NO: 15506 - DNA, 23 bp, Artificial Sequence
  Synthetic
ccgttttttttttttgcatacag

SEQ ID NO: 15507 - DNA, 23 bp, Artificial Sequence
  Synthetic
ccgttttttttttttgcattcag

SEQ ID NO: 15508 - DNA, 23 bp, Artificial Sequence
  Synthetic
ccgttttttttttttgcattcag

SEQ ID NO: 15509 - DNA, 23 bp, Artificial Sequence
  Synthetic
ccgttttttttttttgcatccag

SEQ ID NO: 15510 - DNA, 23 bp, Artificial Sequence
  Synthetic
ccgttttttttttttgcatgcag

SEQ ID NO: 15511 - DNA, 23 bp, Artificial Sequence
  Synthetic
ccgttttttttttttggatgcag

SEQ ID NO: 15512 - DNA, 23 bp, Artificial Sequence
  Synthetic
ccgttttttttttttggatgcag

SEQ ID NO: 15513 - DNA, 23 bp, Artificial Sequence
  Synthetic
ccgttttttttttttggatgcag

SEQ ID NO: 15514 - DNA, 23 bp, Artificial Sequence
  Synthetic
ccgttttttttttttcacgtgcc

SEQ ID NO: 15515 - DNA, 23 bp, Artificial Sequence
  Synthetic
ccgttttttttttttcacgtgcc

SEQ ID NO: 15516 - DNA, 23 bp, Artificial Sequence
  Synthetic
ccgttttttttttttcacgtgcc

SEQ ID NO: 15517 - DNA, 23 bp, Artificial Sequence
  Synthetic
ccgttttttttttttcacgtgcc

SEQ ID NO: 15518 - DNA, 23 bp, Artificial Sequence
  Synthetic
ccgttttttttttttcacgtgcc

SEQ ID NO: 15519 - DNA, 23 bp, Artificial Sequence
  Synthetic
ccgttttttttttttgcatgtgc

SEQ ID NO: 15520 - DNA, 23 bp, Artificial Sequence
  Synthetic
ccgttttttttttttgggaatga

SEQ ID NO: 15521 - DNA, 23 bp, Artificial Sequence
  Synthetic
ccgttttttttttttgggaatga

SEQ ID NO: 15522 - DNA, 23 bp, Artificial Sequence
  Synthetic
ccgttttttttttttgggaatga

SEQ ID NO: 15523 - DNA, 23 bp, Artificial Sequence
  Synthetic
ccgttttttttttttgggaatga

SEQ ID NO: 15524 - DNA, 23 bp, Artificial Sequence
  Synthetic
ccgttttttttttttgggaatga

SEQ ID NO: 15525 - DNA, 23 bp, Artificial Sequence
  Synthetic
ccgttttttttttttgggaatga

SEQ ID NO: 15526 - DNA, 23 bp, Artificial Sequence
  Synthetic
ccgttttttttttttgggaatga

SEQ ID NO: 15527 - DNA, 23 bp, Artificial Sequence
  Synthetic
ccgttttttttttttgggaatga

SEQ ID NO: 15528 - DNA, 23 bp, Artificial Sequence
  Synthetic
ccgttttttttttttgggaatga

SEQ ID NO: 15529 - DNA, 23 bp, Artificial Sequence
  Synthetic
ccgttttttttttttgggaatga

SEQ ID NO: 15530 - DNA, 23 bp, Artificial Sequence
  Synthetic
ccgttttttttttttgggaatga

SEQ ID NO: 15531 - DNA, 23 bp, Artificial Sequence
  Synthetic
ccgttttttttttttgggaatga

SEQ ID NO: 15532 - DNA, 23 bp, Artificial Sequence
  Synthetic
ccgttttttttttttgggaatga

SEQ ID NO: 15533 - DNA, 23 bp, Artificial Sequence
  Synthetic
ccgttttttttttttaggaatga

SEQ ID NO: 15534 - DNA, 23 bp, Artificial Sequence
  Synthetic
ccgttttttttttttaggaatga

SEQ ID NO: 15535 - DNA, 23 bp, Artificial Sequence
  Synthetic
ccgttttttttttttaggaatgg

SEQ ID NO: 15536 - DNA, 23 bp, Artificial Sequence
  Synthetic
ccgttttttttttttaggaatga

SEQ ID NO: 15537 - DNA, 23 bp, Artificial Sequence
  Synthetic
ccgttttttttttttgatcatgc

SEQ ID NO: 15538 - DNA, 23 bp, Artificial Sequence
  Synthetic
ccgttttttttttttgatcatgc

SEQ ID NO: 15539 - DNA, 23 bp, Artificial Sequence
  Synthetic
ccgttttttttttttgatcatgc

SEQ ID NO: 15540 - DNA, 23 bp, Artificial Sequence
  Synthetic
ccgttttttttttttgatcatgc

SEQ ID NO: 15541 - DNA, 23 bp, Artificial Sequence
  Synthetic
ccgttttttttttttagatcatg

SEQ ID NO: 15542 - DNA, 23 bp, Artificial Sequence
  Synthetic
ccgttttttttttttagatcatg

SEQ ID NO: 15543 - DNA, 23 bp, Artificial Sequence
  Synthetic
ccgttttttttttttagatcatg

SEQ ID NO: 15544 - DNA, 23 bp, Artificial Sequence
  Synthetic
ccgttttttttttttagatcatg

SEQ ID NO: 15545 - DNA, 23 bp, Artificial Sequence
  Synthetic
ccgttttttttttttccgacctg

SEQ ID NO: 15546 - DNA, 23 bp, Artificial Sequence
  Synthetic
ccgttttttttttttccgacctg

SEQ ID NO: 15547 - DNA, 23 bp, Artificial Sequence
  Synthetic
ccgttttttttttttggcaagtc

SEQ ID NO: 15548 - DNA, 23 bp, Artificial Sequence
  Synthetic
ccgttttttttttttcgacaagt

SEQ ID NO: 15549 - DNA, 23 bp, Artificial Sequence
  Synthetic
ccgttttttttttttggcaagtc

SEQ ID NO: 15550 - DNA, 23 bp, Artificial Sequence
  Synthetic
ccgttttttttttttggcaagtc

SEQ ID NO: 15551 - DNA, 23 bp, Artificial Sequence
  Synthetic
ccgttttttttttttggcaagtc

SEQ ID NO: 15552 - DNA, 23 bp, Artificial Sequence
  Synthetic
ccgttttttttttttggcaagtc

SEQ ID NO: 15553 - DNA, 23 bp, Artificial Sequence
  Synthetic
ccgttttttttttttggcaagtc

SEQ ID NO: 15554 - DNA, 23 bp, Artificial Sequence
  Synthetic
ccgttttttttttttggcaagtc

SEQ ID NO: 15555 - DNA, 23 bp, Artificial Sequence
  Synthetic
ccgttttttttttttggcaagtc

SEQ ID NO: 15556 - DNA, 23 bp, Artificial Sequence
  Synthetic
ccgttttttttttttcggcaagt

SEQ ID NO: 15557 - DNA, 23 bp, Artificial Sequence
  Synthetic
ccgttttttttttttcggcaagt

SEQ ID NO: 15558 - DNA, 23 bp, Artificial Sequence
  Synthetic
ccgttttttttttttcggcaagt

SEQ ID NO: 15559 - DNA, 23 bp, Artificial Sequence
  Synthetic
ccgttttttttttttcggcaagt

SEQ ID NO: 15560 - DNA, 23 bp, Artificial Sequence
  Synthetic
ccgttttttttttttcggcaagt

SEQ ID NO: 15561 - DNA, 23 bp, Artificial Sequence
  Synthetic
ccgttttttttttttaggcaagt

SEQ ID NO: 15562 - DNA, 23 bp, Artificial Sequence
  Synthetic
ccgttttttttttttaggcaagt

SEQ ID NO: 15563 - DNA, 23 bp, Artificial Sequence
  Synthetic
ccgttttttttttttaggcaagt

SEQ ID NO: 15564 - DNA, 23 bp, Artificial Sequence
  Synthetic
ccgttttttttttttaggcaagt

SEQ ID NO: 15565 - DNA, 23 bp, Artificial Sequence
  Synthetic
ccgttttttttttttaggcaagt

SEQ ID NO: 15566 - DNA, 23 bp, Artificial Sequence
  Synthetic
ccgttttttttttttggcaagtc

SEQ ID NO: 15567 - DNA, 23 bp, Artificial Sequence
  Synthetic
ccgttttttttttttaggcaagt

SEQ ID NO: 15568 - DNA, 23 bp, Artificial Sequence
  Synthetic
ccgttttttttttttaggcaagt

SEQ ID NO: 15569 - DNA, 23 bp, Artificial Sequence
  Synthetic
ccgttttttttttttaggcaagt

SEQ ID NO: 15570 - DNA, 23 bp, Artificial Sequence
  Synthetic
ccgttttttttttttggcaagtc

SEQ ID NO: 15571 - DNA, 23 bp, Artificial Sequence
  Synthetic
ccgttttttttttttggcaagtc

SEQ ID NO: 15572 - DNA, 23 bp, Artificial Sequence
  Synthetic
ccgttttttttttttcggcaagt

SEQ ID NO: 15573 - DNA, 23 bp, Artificial Sequence
  Synthetic
ccgttttttttttttggcaagtc

SEQ ID NO: 15574 - DNA, 23 bp, Artificial Sequence
  Synthetic
ccgttttttttttttggcaagtc

SEQ ID NO: 15575 - DNA, 23 bp, Artificial Sequence
  Synthetic
ccgttttttttttttggcaagtc

SEQ ID NO: 15576 - DNA, 23 bp, Artificial Sequence
  Synthetic
ccgttttttttttttgagcaagt

SEQ ID NO: 15577 - DNA, 23 bp, Artificial Sequence
  Synthetic
ccgttttttttttttaggcaatt

SEQ ID NO: 15578 - DNA, 23 bp, Artificial Sequence
  Synthetic
ccgttttttttttttcggcaaat

SEQ ID NO: 15579 - DNA, 23 bp, Artificial Sequence
  Synthetic
ccgttttttttttttgtgatatt

SEQ ID NO: 15580 - DNA, 23 bp, Artificial Sequence
  Synthetic
ccgttttttttttttgtgatatt

SEQ ID NO: 15581 - DNA, 23 bp, Artificial Sequence
  Synthetic
ccgttttttttttttatattggc

SEQ ID NO: 15582 - DNA, 23 bp, Artificial Sequence
  Synthetic
ccgttttttttttttatattggc

SEQ ID NO: 15583 - DNA, 23 bp, Artificial Sequence
  Synthetic
ccgttttttttttttatattggc

SEQ ID NO: 15584 - DNA, 23 bp, Artificial Sequence
  Synthetic
ccgttttttttttttatattggc

SEQ ID NO: 15585 - DNA, 23 bp, Artificial Sequence
  Synthetic
ccgttttttttttttatattggc

SEQ ID NO: 15586 - DNA, 23 bp, Artificial Sequence
  Synthetic
ccgttttttttttttatattggc

SEQ ID NO: 15587 - DNA, 23 bp, Artificial Sequence
  Synthetic
ccgttttttttttttatattggc

SEQ ID NO: 15588 - DNA, 23 bp, Artificial Sequence
  Synthetic
ccgttttttttttttgtattggc

SEQ ID NO: 15589 - DNA, 23 bp, Artificial Sequence
  Synthetic
ccgttttttttttttatattggc

SEQ ID NO: 15590 - DNA, 23 bp, Artificial Sequence
  Synthetic
ccgttttttttttttgcagcatc

SEQ ID NO: 15591 - DNA, 23 bp, Artificial Sequence
  Synthetic
ccgttttttttttttgcagcatc

SEQ ID NO: 15592 - DNA, 23 bp, Artificial Sequence
  Synthetic
ccgttttttttttttgcagcatc

SEQ ID NO: 15593 - DNA, 23 bp, Artificial Sequence
  Synthetic
ccgttttttttttttgcagcatc

SEQ ID NO: 15594 - DNA, 23 bp, Artificial Sequence
  Synthetic
ccgttttttttttttgcagcatc

SEQ ID NO: 15595 - DNA, 23 bp, Artificial Sequence
  Synthetic
ccgttttttttttttgcagcatc

SEQ ID NO: 15596 - DNA, 23 bp, Artificial Sequence
  Synthetic
ccgttttttttttttgcagcatc

SEQ ID NO: 15597 - DNA, 23 bp, Artificial Sequence
  Synthetic
ccgttttttttttttgcagcatc

SEQ ID NO: 15598 - DNA, 23 bp, Artificial Sequence
  Synthetic
ccgttttttttttttcagcatca

SEQ ID NO: 15599 - DNA, 23 bp, Artificial Sequence
  Synthetic
ccgttttttttttttggagctcc

SEQ ID NO: 15600 - DNA, 23 bp, Artificial Sequence
  Synthetic
ccgttttttttttttggagctcc

SEQ ID NO: 15601 - DNA, 23 bp, Artificial Sequence
  Synthetic
ccgttttttttttttggagctcc

SEQ ID NO: 15602 - DNA, 23 bp, Artificial Sequence
  Synthetic
ccgttttttttttttggagctcc

SEQ ID NO: 15603 - DNA, 23 bp, Artificial Sequence
  Synthetic
ccgttttttttttttggagctcc

SEQ ID NO: 15604 - DNA, 23 bp, Artificial Sequence
  Synthetic
ccgttttttttttttggagctcc

SEQ ID NO: 15605 - DNA, 23 bp, Artificial Sequence
  Synthetic
ccgttttttttttttggagctcc

SEQ ID NO: 15606 - DNA, 23 bp, Artificial Sequence
  Synthetic
ccgttttttttttttggagctcc

SEQ ID NO: 15607 - DNA, 23 bp, Artificial Sequence
  Synthetic
ccgttttttttttttggagctcc

SEQ ID NO: 15608 - DNA, 23 bp, Artificial Sequence
  Synthetic
ccgttttttttttttgcgctatc

SEQ ID NO: 15609 - DNA, 23 bp, Artificial Sequence
  Synthetic
ccgttttttttttttgcgctatc

SEQ ID NO: 15610 - DNA, 23 bp, Artificial Sequence
  Synthetic
ccgttttttttttttgcgctatc

SEQ ID NO: 15611 - DNA, 23 bp, Artificial Sequence
  Synthetic
ccgttttttttttttgcgctatc

SEQ ID NO: 15612 - DNA, 23 bp, Artificial Sequence
  Synthetic
ccgttttttttttttatcaatgc

SEQ ID NO: 15613 - DNA, 23 bp, Artificial Sequence
  Synthetic
ccgttttttttttttatcaatgc

SEQ ID NO: 15614 - DNA, 23 bp, Artificial Sequence
  Synthetic
ccgttttttttttttatcaatgc

SEQ ID NO: 15615 - DNA, 23 bp, Artificial Sequence
  Synthetic
ccgttttttttttttatcaatgc

SEQ ID NO: 15616 - DNA, 23 bp, Artificial Sequence
  Synthetic
ccgttttttttttttgaggtgga

SEQ ID NO: 15617 - DNA, 23 bp, Artificial Sequence
  Synthetic
ccgttttttttttttgaggtgga

SEQ ID NO: 15618 - DNA, 23 bp, Artificial Sequence
  Synthetic
ccgttttttttttttagttcctc

SEQ ID NO: 15619 - DNA, 23 bp, Artificial Sequence
  Synthetic
ccgttttttttttttagttcccc

SEQ ID NO: 15620 - DNA, 23 bp, Artificial Sequence
  Synthetic
ccgttttttttttttagttcccc

SEQ ID NO: 15621 - DNA, 23 bp, Artificial Sequence
  Synthetic
ccgttttttttttttagttcccc

SEQ ID NO: 15622 - DNA, 23 bp, Artificial Sequence
  Synthetic
ccgttttttttttttagttcccc

SEQ ID NO: 15623 - DNA, 23 bp, Artificial Sequence
  Synthetic
ccgttttttttttttagttcccc

SEQ ID NO: 15624 - DNA, 23 bp, Artificial Sequence
  Synthetic
ccgttttttttttttagttcccc

SEQ ID NO: 15625 - DNA, 23 bp, Artificial Sequence
  Synthetic
ccgttttttttttttagttcccc

SEQ ID NO: 15626 - DNA, 23 bp, Artificial Sequence
  Synthetic
ccgttttttttttttagttcccc

SEQ ID NO: 15627 - DNA, 23 bp, Artificial Sequence
  Synthetic
ccgttttttttttttagttcccc

SEQ ID NO: 15628 - DNA, 23 bp, Artificial Sequence
  Synthetic
ccgttttttttttttagttcaag

SEQ ID NO: 15629 - DNA, 23 bp, Artificial Sequence
  Synthetic
ccgttttttttttttagttcaag

SEQ ID NO: 15630 - DNA, 23 bp, Artificial Sequence
  Synthetic
ccgttttttttttttagttcaag

SEQ ID NO: 15631 - DNA, 23 bp, Artificial Sequence
  Synthetic
ccgttttttttttttagttcaag

SEQ ID NO: 15632 - DNA, 23 bp, Artificial Sequence
  Synthetic
ccgttttttttttttagttcaag

SEQ ID NO: 15633 - DNA, 23 bp, Artificial Sequence
  Synthetic
ccgttttttttttttagttcaag

SEQ ID NO: 15634 - DNA, 23 bp, Artificial Sequence
  Synthetic
ccgttttttttttttagttcaag

SEQ ID NO: 15635 - DNA, 23 bp, Artificial Sequence
  Synthetic
ccgttttttttttttatcaacgc

SEQ ID NO: 15636 - DNA, 23 bp, Artificial Sequence
  Synthetic
ccgttttttttttttatcaacgc

SEQ ID NO: 15637 - DNA, 23 bp, Artificial Sequence
  Synthetic
ccgttttttttttttatcaaagc

SEQ ID NO: 15638 - DNA, 23 bp, Artificial Sequence
  Synthetic
ccgttttttttttttaggggtga

SEQ ID NO: 15639 - DNA, 23 bp, Artificial Sequence
  Synthetic
ccgttttttttttttaggggcga

SEQ ID NO: 15640 - DNA, 23 bp, Artificial Sequence
  Synthetic
ccgttttttttttttaggggcga

SEQ ID NO: 15641 - DNA, 23 bp, Artificial Sequence
  Synthetic
ccgttttttttttttggggcaaa

SEQ ID NO: 15642 - DNA, 23 bp, Artificial Sequence
  Synthetic
ccgttttttttttttcgggcaaa

SEQ ID NO: 15643 - DNA, 23 bp, Artificial Sequence
  Synthetic
ccgttttttttttttcgggcaaa

SEQ ID NO: 15644 - DNA, 23 bp, Artificial Sequence
  Synthetic
ccgttttttttttttggggcaaa

SEQ ID NO: 15645 - DNA, 23 bp, Artificial Sequence
  Synthetic
ccgttttttttttttggggcaaa

SEQ ID NO: 15646 - DNA, 23 bp, Artificial Sequence
  Synthetic
ccgttttttttttttagggcaat

SEQ ID NO: 15647 - DNA, 23 bp, Artificial Sequence
  Synthetic
ccgttttttttttttagggcaat

SEQ ID NO: 15648 - DNA, 23 bp, Artificial Sequence
  Synthetic
ccgttttttttttttagggaaac

SEQ ID NO: 15649 - DNA, 23 bp, Artificial Sequence
  Synthetic
ccgttttttttttttgggcaact

SEQ ID NO: 15650 - DNA, 23 bp, Artificial Sequence
  Synthetic
ccgttttttttttttcggacaaa

SEQ ID NO: 15651 - DNA, 23 bp, Artificial Sequence
  Synthetic
ccgttttttttttttgagcaaat

SEQ ID NO: 15652 - DNA, 23 bp, Artificial Sequence
  Synthetic
ccgttttttttttttagggcaac

SEQ ID NO: 15653 - DNA, 23 bp, Artificial Sequence
  Synthetic
ccgttttttttttttgagtttgt

SEQ ID NO: 15654 - DNA, 23 bp, Artificial Sequence
  Synthetic
ccgttttttttttttgagtttgt

SEQ ID NO: 15655 - DNA, 23 bp, Artificial Sequence
  Synthetic
ccgttttttttttttgagtttgt

SEQ ID NO: 15656 - DNA, 23 bp, Artificial Sequence
  Synthetic
ccgttttttttttttccagggaa

SEQ ID NO: 15657 - DNA, 23 bp, Artificial Sequence
  Synthetic
ccgttttttttttttggatgggt

SEQ ID NO: 15658 - DNA, 23 bp, Artificial Sequence
  Synthetic
ccgttttttttttttggatgggt

SEQ ID NO: 15659 - DNA, 23 bp, Artificial Sequence
  Synthetic
ccgttttttttttttgaagcctt

SEQ ID NO: 15660 - DNA, 23 bp, Artificial Sequence
  Synthetic
ccgttttttttttttgaagccct

SEQ ID NO: 15661 - DNA, 23 bp, Artificial Sequence
  Synthetic
ccgttttttttttttccagccaa

SEQ ID NO: 15662 - DNA, 23 bp, Artificial Sequence
  Synthetic
ccgttttttttttttccagccaa

SEQ ID NO: 15663 - DNA, 23 bp, Artificial Sequence
  Synthetic
ccgttttttttttttccagccaa

SEQ ID NO: 15664 - DNA, 23 bp, Artificial Sequence
  Synthetic
ccgttttttttttttaatcaatg

SEQ ID NO: 15665 - DNA, 23 bp, Artificial Sequence
  Synthetic
ccgttttttttttttaatcaatg

SEQ ID NO: 15666 - DNA, 23 bp, Artificial Sequence
  Synthetic
ccgttttttttttttaatcaatg

SEQ ID NO: 15667 - DNA, 23 bp, Artificial Sequence
  Synthetic
ccgttttttttttttaatcaatg

SEQ ID NO: 15668 - DNA, 23 bp, Artificial Sequence
  Synthetic
ccgttttttttttttgcaaagaa

SEQ ID NO: 15669 - DNA, 23 bp, Artificial Sequence
  Synthetic
ccgttttttttttttcaaagaag

SEQ ID NO: 15670 - DNA, 23 bp, Artificial Sequence
  Synthetic
ccgttttttttttttcaaagaag

SEQ ID NO: 15671 - DNA, 23 bp, Artificial Sequence
  Synthetic
ccgttttttttttttgaagcctc

SEQ ID NO: 15672 - DNA, 23 bp, Artificial Sequence
  Synthetic
ccgttttttttttttgaagcctc

SEQ ID NO: 15673 - DNA, 23 bp, Artificial Sequence
  Synthetic
ccgttttttttttttcctaaaaa

SEQ ID NO: 15674 - DNA, 23 bp, Artificial Sequence
  Synthetic
ccgttttttttttttcctaaaaa

SEQ ID NO: 15675 - DNA, 23 bp, Artificial Sequence
  Synthetic
ccgttttttttttttcctaaaaa

SEQ ID NO: 15676 - DNA, 23 bp, Artificial Sequence
  Synthetic
ccgttttttttttttctaaaaat

SEQ ID NO: 15677 - DNA, 23 bp, Artificial Sequence
  Synthetic
ccgttttttttttttcctaaaaa

SEQ ID NO: 15678 - DNA, 23 bp, Artificial Sequence
  Synthetic
ccgttttttttttttcctaaaaa

SEQ ID NO: 15679 - DNA, 23 bp, Artificial Sequence
  Synthetic
ccgttttttttttttcctaaaaa

SEQ ID NO: 15680 - DNA, 23 bp, Artificial Sequence
  Synthetic
ccgttttttttttttcctaaaaa

SEQ ID NO: 15681 - DNA, 23 bp, Artificial Sequence
  Synthetic
ccgttttttttttttcctaaaaa

SEQ ID NO: 15682 - DNA, 23 bp, Artificial Sequence
  Synthetic
ccgttttttttttttcctaaaaa

SEQ ID NO: 15683 - DNA, 23 bp, Artificial Sequence
  Synthetic
ccgttttttttttttcctaaaaa

SEQ ID NO: 15684 - DNA, 23 bp, Artificial Sequence
  Synthetic
ccgttttttttttttcctaaaaa

SEQ ID NO: 15685 - DNA, 23 bp, Artificial Sequence
  Synthetic
ccgttttttttttttcctaaaaa

SEQ ID NO: 15686 - DNA, 23 bp, Artificial Sequence
  Synthetic
ccgttttttttttttcctaaaaa

SEQ ID NO: 15687 - DNA, 23 bp, Artificial Sequence
  Synthetic
ccgttttttttttttcctaaaaa

SEQ ID NO: 15688 - DNA, 23 bp, Artificial Sequence
  Synthetic
ccgttttttttttttcctaaaaa

SEQ ID NO: 15689 - DNA, 23 bp, Artificial Sequence
  Synthetic
ccgttttttttttttcctaaaaa

SEQ ID NO: 15690 - DNA, 23 bp, Artificial Sequence
  Synthetic
ccgttttttttttttcctaaaaa

SEQ ID NO: 15691 - DNA, 23 bp, Artificial Sequence
  Synthetic
ccgttttttttttttcctaaaaa

SEQ ID NO: 15692 - DNA, 23 bp, Artificial Sequence
  Synthetic
ccgttttttttttttatgagccg

SEQ ID NO: 15693 - DNA, 23 bp, Artificial Sequence
  Synthetic
ccgttttttttttttcaacgtca

SEQ ID NO: 15694 - DNA, 23 bp, Artificial Sequence
  Synthetic
ccgttttttttttttcaacatca

SEQ ID NO: 15695 - DNA, 23 bp, Artificial Sequence
  Synthetic
ccgttttttttttttcttaagct

SEQ ID NO: 15696 - DNA, 23 bp, Artificial Sequence
  Synthetic
ccgttttttttttttcttaagct

SEQ ID NO: 15697 - DNA, 23 bp, Artificial Sequence
  Synthetic
ccgttttttttttttcttaagct

SEQ ID NO: 15698 - DNA, 23 bp, Artificial Sequence
  Synthetic
ccgttttttttttttcttaagct

SEQ ID NO: 15699 - DNA, 23 bp, Artificial Sequence
  Synthetic
ccgttttttttttttcttaagct

SEQ ID NO: 15700 - DNA, 23 bp, Artificial Sequence
  Synthetic
ccgttttttttttttgaatggga

SEQ ID NO: 15701 - DNA, 23 bp, Artificial Sequence
  Synthetic
ccgttttttttttttacaagttc

SEQ ID NO: 15702 - DNA, 23 bp, Artificial Sequence
  Synthetic
ccgttttttttttttcagttatc

SEQ ID NO: 15703 - DNA, 23 bp, Artificial Sequence
  Synthetic
ccgttttttttttttatagccct

SEQ ID NO: 15704 - DNA, 23 bp, Artificial Sequence
  Synthetic
ccgttttttttttttcaggagtc

SEQ ID NO: 15705 - DNA, 23 bp, Artificial Sequence
  Synthetic
ccgttttttttttttctacctgc

SEQ ID NO: 15706 - DNA, 23 bp, Artificial Sequence
  Synthetic
ccgttttttttttttctgcactg

SEQ ID NO: 15707 - DNA, 23 bp, Artificial Sequence
  Synthetic
ccgttttttttttttatagccct

SEQ ID NO: 15708 - DNA, 23 bp, Artificial Sequence
  Synthetic
ccgttttttttttttgcattcac

SEQ ID NO: 15709 - DNA, 23 bp, Artificial Sequence
  Synthetic
ccgttttttttttttacaagtta

SEQ ID NO: 15710 - DNA, 23 bp, Artificial Sequence
  Synthetic
ccgttttttttttttgccaagct

SEQ ID NO: 15711 - DNA, 23 bp, Artificial Sequence
  Synthetic
ccgttttttttttttaaagagac

SEQ ID NO: 15712 - DNA, 23 bp, Artificial Sequence
  Synthetic
ccgttttttttttttagctggtt

SEQ ID NO: 15713 - DNA, 23 bp, Artificial Sequence
  Synthetic
ccgttttttttttttacatagga

SEQ ID NO: 15714 - DNA, 23 bp, Artificial Sequence
  Synthetic
ccgttttttttttttcatcatca

SEQ ID NO: 15715 - DNA, 23 bp, Artificial Sequence
  Synthetic
ccgttttttttttttaccatagg

SEQ ID NO: 15716 - DNA, 23 bp, Artificial Sequence
  Synthetic
ccgttttttttttttagctacag

SEQ ID NO: 15717 - DNA, 23 bp, Artificial Sequence
  Synthetic
ccgttttttttttttagtacatc

SEQ ID NO: 15718 - DNA, 23 bp, Artificial Sequence
  Synthetic
ccgttttttttttttagggattc

SEQ ID NO: 15719 - DNA, 23 bp, Artificial Sequence
  Synthetic
ccgttttttttttttcagaagca

SEQ ID NO: 15720 - DNA, 23 bp, Artificial Sequence
  Synthetic
ccgttttttttttttgaaggcaa

SEQ ID NO: 15721 - DNA, 23 bp, Artificial Sequence
  Synthetic
ccgttttttttttttacaaacca

SEQ ID NO: 15722 - DNA, 23 bp, Artificial Sequence
  Synthetic
ccgttttttttttttaaaccatg

SEQ ID NO: 15723 - DNA, 23 bp, Artificial Sequence
  Synthetic
ccgttttttttttttgccaatat

SEQ ID NO: 15724 - DNA, 23 bp, Artificial Sequence
  Synthetic
ccgttttttttttttcaagtgcc

SEQ ID NO: 15725 - DNA, 23 bp, Artificial Sequence
  Synthetic
ccgttttttttttttctacctgc

SEQ ID NO: 15726 - DNA, 23 bp, Artificial Sequence
  Synthetic
ccgttttttttttttctgcacta

SEQ ID NO: 15727 - DNA, 23 bp, Artificial Sequence
  Synthetic
ccgttttttttttttctcaccga

SEQ ID NO: 15728 - DNA, 23 bp, Artificial Sequence
  Synthetic
ccgttttttttttttgtacaatc

SEQ ID NO: 15729 - DNA, 23 bp, Artificial Sequence
  Synthetic
ccgttttttttttttacccaccg

SEQ ID NO: 15730 - DNA, 23 bp, Artificial Sequence
  Synthetic
ccgttttttttttttctcaccga

SEQ ID NO: 15731 - DNA, 23 bp, Artificial Sequence
  Synthetic
ccgttttttttttttagtgaatt

SEQ ID NO: 15732 - DNA, 23 bp, Artificial Sequence
  Synthetic
ccgttttttttttttcccttatc

SEQ ID NO: 15733 - DNA, 23 bp, Artificial Sequence
  Synthetic
ccgttttttttttttagcccaaa

SEQ ID NO: 15734 - DNA, 23 bp, Artificial Sequence
  Synthetic
ccgttttttttttttccctccac

SEQ ID NO: 15735 - DNA, 23 bp, Artificial Sequence
  Synthetic
ccgttttttttttttcctaatat

SEQ ID NO: 15736 - DNA, 23 bp, Artificial Sequence
  Synthetic
ccgttttttttttttcacatgga

SEQ ID NO: 15737 - DNA, 23 bp, Artificial Sequence
  Synthetic
ccgttttttttttttccaacaac

SEQ ID NO: 15738 - DNA, 23 bp, Artificial Sequence
  Synthetic
ccgttttttttttttctgggtgg

SEQ ID NO: 15739 - DNA, 23 bp, Artificial Sequence
  Synthetic
ccgttttttttttttctatctcc

SEQ ID NO: 15740 - DNA, 23 bp, Artificial Sequence
  Synthetic
ccgttttttttttttaacaggta

SEQ ID NO: 15741 - DNA, 23 bp, Artificial Sequence
  Synthetic
ccgttttttttttttagttttgc

SEQ ID NO: 15742 - DNA, 23 bp, Artificial Sequence
  Synthetic
ccgttttttttttttagttttgc

SEQ ID NO: 15743 - DNA, 23 bp, Artificial Sequence
  Synthetic
ccgttttttttttttcctgcact

SEQ ID NO: 15744 - DNA, 23 bp, Artificial Sequence
  Synthetic
ccgttttttttttttggcatagg

SEQ ID NO: 15745 - DNA, 23 bp, Artificial Sequence
  Synthetic
ccgttttttttttttagactccg

SEQ ID NO: 15746 - DNA, 23 bp, Artificial Sequence
  Synthetic
ccgttttttttttttaacatcag

SEQ ID NO: 15747 - DNA, 23 bp, Artificial Sequence
  Synthetic
ccgttttttttttttgcctgtct

SEQ ID NO: 15748 - DNA, 23 bp, Artificial Sequence
  Synthetic
ccgttttttttttttctgtcaat

SEQ ID NO: 15749 - DNA, 23 bp, Artificial Sequence
  Synthetic
ccgttttttttttttacagttgc

SEQ ID NO: 15750 - DNA, 23 bp, Artificial Sequence
  Synthetic
ccgttttttttttttcatggtta

SEQ ID NO: 15751 - DNA, 23 bp, Artificial Sequence
  Synthetic
ccgttttttttttttcagttctt

SEQ ID NO: 15752 - DNA, 23 bp, Artificial Sequence
  Synthetic
ccgttttttttttttaagtgtca

SEQ ID NO: 15753 - DNA, 23 bp, Artificial Sequence
  Synthetic
ccgttttttttttttgggtattt

SEQ ID NO: 15754 - DNA, 23 bp, Artificial Sequence
  Synthetic
ccgttttttttttttaacggaac

SEQ ID NO: 15755 - DNA, 23 bp, Artificial Sequence
  Synthetic
ccgttttttttttttgaaatccc

SEQ ID NO: 15756 - DNA, 23 bp, Artificial Sequence
  Synthetic
ccgttttttttttttggtaatcc

SEQ ID NO: 15757 - DNA, 23 bp, Artificial Sequence
  Synthetic
ccgttttttttttttgttcctgc

SEQ ID NO: 15758 - DNA, 23 bp, Artificial Sequence
  Synthetic
ccgttttttttttttagaccgag

SEQ ID NO: 15759 - DNA, 23 bp, Artificial Sequence
  Synthetic
ccgttttttttttttgcctatcc

SEQ ID NO: 15760 - DNA, 23 bp, Artificial Sequence
  Synthetic
ccgttttttttttttgcggaact

SEQ ID NO: 15761 - DNA, 23 bp, Artificial Sequence
  Synthetic
ccgttttttttttttcaatagac

SEQ ID NO: 15762 - DNA, 23 bp, Artificial Sequence
  Synthetic
ccgttttttttttttaccgattt

SEQ ID NO: 15763 - DNA, 23 bp, Artificial Sequence
  Synthetic
ccgttttttttttttctgatttc

SEQ ID NO: 15764 - DNA, 23 bp, Artificial Sequence
  Synthetic
ccgttttttttttttctgcaaac

SEQ ID NO: 15765 - DNA, 23 bp, Artificial Sequence
  Synthetic
ccgttttttttttttccagtcga

SEQ ID NO: 15766 - DNA, 23 bp, Artificial Sequence
  Synthetic
ccgttttttttttttctgagtgt

SEQ ID NO: 15767 - DNA, 23 bp, Artificial Sequence
  Synthetic
ccgttttttttttttctgagagt

SEQ ID NO: 15768 - DNA, 23 bp, Artificial Sequence
  Synthetic
ccgttttttttttttccagtcgg

SEQ ID NO: 15769 - DNA, 23 bp, Artificial Sequence
  Synthetic
ccgttttttttttttagctatgc

SEQ ID NO: 15770 - DNA, 23 bp, Artificial Sequence
  Synthetic
ccgttttttttttttcaacttag

SEQ ID NO: 15771 - DNA, 23 bp, Artificial Sequence
  Synthetic
ccgttttttttttttaatgcaac

SEQ ID NO: 15772 - DNA, 23 bp, Artificial Sequence
  Synthetic
ccgttttttttttttcaaccagc

SEQ ID NO: 15773 - DNA, 23 bp, Artificial Sequence
  Synthetic
ccgttttttttttttacaaaatc

SEQ ID NO: 15774 - DNA, 23 bp, Artificial Sequence
  Synthetic
ccgttttttttttttatacagct

SEQ ID NO: 15775 - DNA, 23 bp, Artificial Sequence
  Synthetic
ccgttttttttttttcaggccgg

SEQ ID NO: 15776 - DNA, 23 bp, Artificial Sequence
  Synthetic
ccgttttttttttttacctgcac

SEQ ID NO: 15777 - DNA, 23 bp, Artificial Sequence
  Synthetic
ccgttttttttttttctcaataa

SEQ ID NO: 15778 - DNA, 23 bp, Artificial Sequence
  Synthetic
ccgttttttttttttcaaaaatg

SEQ ID NO: 15779 - DNA, 23 bp, Artificial Sequence
  Synthetic
ccgttttttttttttacaataca

SEQ ID NO: 15780 - DNA, 23 bp, Artificial Sequence
  Synthetic
ccgttttttttttttacaagatc

SEQ ID NO: 15781 - DNA, 23 bp, Artificial Sequence
  Synthetic
ccgttttttttttttaccccggg

SEQ ID NO: 15782 - DNA, 23 bp, Artificial Sequence
  Synthetic
ccgttttttttttttatcaggtc

SEQ ID NO: 15783 - DNA, 23 bp, Artificial Sequence
  Synthetic
ccgttttttttttttcccgtatc

SEQ ID NO: 15784 - DNA, 23 bp, Artificial Sequence
  Synthetic
ccgttttttttttttagccagtc

SEQ ID NO: 15785 - DNA, 23 bp, Artificial Sequence
  Synthetic
ccgttttttttttttccactgtg

SEQ ID NO: 15786 - DNA, 23 bp, Artificial Sequence
  Synthetic
ccgttttttttttttcctggaca

SEQ ID NO: 15787 - DNA, 23 bp, Artificial Sequence
  Synthetic
ccgttttttttttttcgttcagc

SEQ ID NO: 15788 - DNA, 23 bp, Artificial Sequence
  Synthetic
ccgttttttttttttcaagcgca

SEQ ID NO: 15789 - DNA, 23 bp, Artificial Sequence
  Synthetic
ccgttttttttttttaaccacac

SEQ ID NO: 15790 - DNA, 23 bp, Artificial Sequence
  Synthetic
ccgttttttttttttgaacaggc

SEQ ID NO: 15791 - DNA, 23 bp, Artificial Sequence
  Synthetic
ccgttttttttttttgaatgaag

SEQ ID NO: 15792 - DNA, 23 bp, Artificial Sequence
  Synthetic
ccgttttttttttttgaaattcc

SEQ ID NO: 15793 - DNA, 23 bp, Artificial Sequence
  Synthetic
ccgttttttttttttgcagtaga

SEQ ID NO: 15794 - DNA, 23 bp, Artificial Sequence
  Synthetic
ccgttttttttttttgacctagt

SEQ ID NO: 15795 - DNA, 23 bp, Artificial Sequence
  Synthetic
ccgttttttttttttacaccgca

SEQ ID NO: 15796 - DNA, 23 bp, Artificial Sequence
  Synthetic
ccgttttttttttttcacctagt

SEQ ID NO: 15797 - DNA, 23 bp, Artificial Sequence
  Synthetic
ccgttttttttttttgcacatca

SEQ ID NO: 15798 - DNA, 23 bp, Artificial Sequence
  Synthetic
ccgttttttttttttacatagtg

SEQ ID NO: 15799 - DNA, 23 bp, Artificial Sequence
  Synthetic
ccgttttttttttttacagcacg

SEQ ID NO: 15800 - DNA, 23 bp, Artificial Sequence
  Synthetic
ccgttttttttttttagtaagcc

SEQ ID NO: 15801 - DNA, 23 bp, Artificial Sequence
  Synthetic
ccgttttttttttttaatgggca

SEQ ID NO: 15802 - DNA, 23 bp, Artificial Sequence
  Synthetic
ccgttttttttttttctaagggg

SEQ ID NO: 15803 - DNA, 23 bp, Artificial Sequence
  Synthetic
ccgttttttttttttactataca

SEQ ID NO: 15804 - DNA, 23 bp, Artificial Sequence
  Synthetic
ccgttttttttttttaccacaca

SEQ ID NO: 15805 - DNA, 23 bp, Artificial Sequence
  Synthetic
ccgttttttttttttaccataca

SEQ ID NO: 15806 - DNA, 23 bp, Artificial Sequence
  Synthetic
ccgttttttttttttctatgcaa

SEQ ID NO: 15807 - DNA, 23 bp, Artificial Sequence
  Synthetic
ccgttttttttttttgaaaggca

SEQ ID NO: 15808 - DNA, 23 bp, Artificial Sequence
  Synthetic
ccgttttttttttttctatacaa

SEQ ID NO: 15809 - DNA, 23 bp, Artificial Sequence
  Synthetic
ccgttttttttttttactataca

SEQ ID NO: 15810 - DNA, 23 bp, Artificial Sequence
  Synthetic
ccgttttttttttttcagcacaa

SEQ ID NO: 15811 - DNA, 23 bp, Artificial Sequence
  Synthetic
ccgttttttttttttcacacttc

SEQ ID NO: 15812 - DNA, 23 bp, Artificial Sequence
  Synthetic
ccgttttttttttttggtacata

SEQ ID NO: 15813 - DNA, 23 bp, Artificial Sequence
  Synthetic
ccgttttttttttttacaagttc

SEQ ID NO: 15814 - DNA, 23 bp, Artificial Sequence
  Synthetic
ccgttttttttttttcagttatc

SEQ ID NO: 15815 - DNA, 23 bp, Artificial Sequence
  Synthetic
ccgttttttttttttcagctatc

SEQ ID NO: 15816 - DNA, 23 bp, Artificial Sequence
  Synthetic
ccgttttttttttttatagccct

SEQ ID NO: 15817 - DNA, 23 bp, Artificial Sequence
  Synthetic
ccgttttttttttttctgcactg

SEQ ID NO: 15818 - DNA, 23 bp, Artificial Sequence
  Synthetic
ccgttttttttttttatagccct

SEQ ID NO: 15819 - DNA, 23 bp, Artificial Sequence
  Synthetic
ccgttttttttttttacaaattc

SEQ ID NO: 15820 - DNA, 23 bp, Artificial Sequence
  Synthetic
ccgttttttttttttcacaaatt

SEQ ID NO: 15821 - DNA, 23 bp, Artificial Sequence
  Synthetic
ccgttttttttttttcaaacacc

SEQ ID NO: 15822 - DNA, 23 bp, Artificial Sequence
  Synthetic
ccgttttttttttttgcattcac

SEQ ID NO: 15823 - DNA, 23 bp, Artificial Sequence
  Synthetic
ccgttttttttttttacaggtta

SEQ ID NO: 15824 - DNA, 23 bp, Artificial Sequence
  Synthetic
ccgttttttttttttacaagtta

SEQ ID NO: 15825 - DNA, 23 bp, Artificial Sequence
  Synthetic
ccgttttttttttttcattatta

SEQ ID NO: 15826 - DNA, 23 bp, Artificial Sequence
  Synthetic
ccgttttttttttttgcgtacca

SEQ ID NO: 15827 - DNA, 23 bp, Artificial Sequence
  Synthetic
ccgttttttttttttgccaagct

SEQ ID NO: 15828 - DNA, 23 bp, Artificial Sequence
  Synthetic
ccgttttttttttttaaagagac

SEQ ID NO: 15829 - DNA, 23 bp, Artificial Sequence
  Synthetic
ccgttttttttttttaaagagac

SEQ ID NO: 15830 - DNA, 23 bp, Artificial Sequence
  Synthetic
ccgttttttttttttgcaagccc

SEQ ID NO: 15831 - DNA, 23 bp, Artificial Sequence
  Synthetic
ccgttttttttttttgctttttg

SEQ ID NO: 15832 - DNA, 23 bp, Artificial Sequence
  Synthetic
ccgttttttttttttgccctttt

SEQ ID NO: 15833 - DNA, 23 bp, Artificial Sequence
  Synthetic
ccgttttttttttttgccctttc

SEQ ID NO: 15834 - DNA, 23 bp, Artificial Sequence
  Synthetic
ccgttttttttttttgaccatgg

SEQ ID NO: 15835 - DNA, 23 bp, Artificial Sequence
  Synthetic
ccgttttttttttttcagctggt

SEQ ID NO: 15836 - DNA, 23 bp, Artificial Sequence
  Synthetic
ccgttttttttttttgctggttg

SEQ ID NO: 15837 - DNA, 23 bp, Artificial Sequence
  Synthetic
ccgttttttttttttcctctggt

SEQ ID NO: 15838 - DNA, 23 bp, Artificial Sequence
  Synthetic
ccgttttttttttttacatagga

SEQ ID NO: 15839 - DNA, 23 bp, Artificial Sequence
  Synthetic
ccgttttttttttttacatagga

SEQ ID NO: 15840 - DNA, 23 bp, Artificial Sequence
  Synthetic
ccgttttttttttttcatcatca

SEQ ID NO: 15841 - DNA, 23 bp, Artificial Sequence
  Synthetic
ccgttttttttttttacgcgtat

SEQ ID NO: 15842 - DNA, 23 bp, Artificial Sequence
  Synthetic
ccgttttttttttttattcacaa

SEQ ID NO: 15843 - DNA, 23 bp, Artificial Sequence
  Synthetic
ccgttttttttttttgacacgtg

SEQ ID NO: 15844 - DNA, 23 bp, Artificial Sequence
  Synthetic
ccgttttttttttttaccatagg

SEQ ID NO: 15845 - DNA, 23 bp, Artificial Sequence
  Synthetic
ccgttttttttttttccgtggtt

SEQ ID NO: 15846 - DNA, 23 bp, Artificial Sequence
  Synthetic
ccgttttttttttttcatcttta

SEQ ID NO: 15847 - DNA, 23 bp, Artificial Sequence
  Synthetic
ccgttttttttttttcataaagt

SEQ ID NO: 15848 - DNA, 23 bp, Artificial Sequence
  Synthetic
ccgttttttttttttagtgcttt

SEQ ID NO: 15849 - DNA, 23 bp, Artificial Sequence
  Synthetic
ccgttttttttttttagctacag

SEQ ID NO: 15850 - DNA, 23 bp, Artificial Sequence
  Synthetic
ccgttttttttttttagtacatc

SEQ ID NO: 15851 - DNA, 23 bp, Artificial Sequence
  Synthetic
ccgttttttttttttagggattc

SEQ ID NO: 15852 - DNA, 23 bp, Artificial Sequence
  Synthetic
ccgttttttttttttacccatgg

SEQ ID NO: 15853 - DNA, 23 bp, Artificial Sequence
  Synthetic
ccgttttttttttttcaaagttc

SEQ ID NO: 15854 - DNA, 23 bp, Artificial Sequence
  Synthetic
ccgttttttttttttactggtac

SEQ ID NO: 15855 - DNA, 23 bp, Artificial Sequence
  Synthetic
ccgttttttttttttctcaagga

SEQ ID NO: 15856 - DNA, 23 bp, Artificial Sequence
  Synthetic
ccgttttttttttttctagactg

SEQ ID NO: 15857 - DNA, 23 bp, Artificial Sequence
  Synthetic
ccgttttttttttttccaagttc

SEQ ID NO: 15858 - DNA, 23 bp, Artificial Sequence
  Synthetic
ccgttttttttttttacttttgt

SEQ ID NO: 15859 - DNA, 23 bp, Artificial Sequence
  Synthetic
ccgttttttttttttgaaggcaa

SEQ ID NO: 15860 - DNA, 23 bp, Artificial Sequence
  Synthetic
ccgttttttttttttaaaccatg

SEQ ID NO: 15861 - DNA, 23 bp, Artificial Sequence
  Synthetic
ccgttttttttttttgccaatat

SEQ ID NO: 15862 - DNA, 23 bp, Artificial Sequence
  Synthetic
ccgttttttttttttctacctgc

SEQ ID NO: 15863 - DNA, 23 bp, Artificial Sequence
  Synthetic
ccgttttttttttttctgcacta

SEQ ID NO: 15864 - DNA, 23 bp, Artificial Sequence
  Synthetic
ccgttttttttttttctcaccga

SEQ ID NO: 15865 - DNA, 23 bp, Artificial Sequence
  Synthetic
ccgttttttttttttgtacaatc

SEQ ID NO: 15866 - DNA, 23 bp, Artificial Sequence
  Synthetic
ccgttttttttttttccaccgac

SEQ ID NO: 15867 - DNA, 23 bp, Artificial Sequence
  Synthetic
ccgttttttttttttctcaccga

SEQ ID NO: 15868 - DNA, 23 bp, Artificial Sequence
  Synthetic
ccgttttttttttttagtgaatt

SEQ ID NO: 15869 - DNA, 23 bp, Artificial Sequence
  Synthetic
ccgttttttttttttcccttatc

SEQ ID NO: 15870 - DNA, 23 bp, Artificial Sequence
  Synthetic
ccgttttttttttttaactgcct

SEQ ID NO: 15871 - DNA, 23 bp, Artificial Sequence
  Synthetic
ccgttttttttttttagcccaaa

SEQ ID NO: 15872 - DNA, 23 bp, Artificial Sequence
  Synthetic
ccgttttttttttttggctgcaa

SEQ ID NO: 15873 - DNA, 23 bp, Artificial Sequence
  Synthetic
ccgttttttttttttctgatatc

SEQ ID NO: 15874 - DNA, 23 bp, Artificial Sequence
  Synthetic
ccgttttttttttttcctaatat

SEQ ID NO: 15875 - DNA, 23 bp, Artificial Sequence
  Synthetic
ccgttttttttttttgctgcttt

SEQ ID NO: 15876 - DNA, 23 bp, Artificial Sequence
  Synthetic
ccgttttttttttttgctgtcaa

SEQ ID NO: 15877 - DNA, 23 bp, Artificial Sequence
  Synthetic
ccgttttttttttttgggacttt

SEQ ID NO: 15878 - DNA, 23 bp, Artificial Sequence
  Synthetic
ccgttttttttttttcacatgga

SEQ ID NO: 15879 - DNA, 23 bp, Artificial Sequence
  Synthetic
ccgttttttttttttccaatatt

SEQ ID NO: 15880 - DNA, 23 bp, Artificial Sequence
  Synthetic
ccgttttttttttttcaacaaca

SEQ ID NO: 15881 - DNA, 23 bp, Artificial Sequence
  Synthetic
ccgttttttttttttcaacaaca

SEQ ID NO: 15882 - DNA, 23 bp, Artificial Sequence
  Synthetic
ccgttttttttttttaacaggta

SEQ ID NO: 15883 - DNA, 23 bp, Artificial Sequence
  Synthetic
ccgttttttttttttagttttgc

SEQ ID NO: 15884 - DNA, 23 bp, Artificial Sequence
  Synthetic
ccgttttttttttttagttttgc

SEQ ID NO: 15885 - DNA, 23 bp, Artificial Sequence
  Synthetic
ccgttttttttttttcatcgtta

SEQ ID NO: 15886 - DNA, 23 bp, Artificial Sequence
  Synthetic
ccgttttttttttttcatcatta

SEQ ID NO: 15887 - DNA, 23 bp, Artificial Sequence
  Synthetic
ccgttttttttttttcatcatta

SEQ ID NO: 15888 - DNA, 23 bp, Artificial Sequence
  Synthetic
ccgttttttttttttagtggtcc

SEQ ID NO: 15889 - DNA, 23 bp, Artificial Sequence
  Synthetic
ccgttttttttttttggcatagg

SEQ ID NO: 15890 - DNA, 23 bp, Artificial Sequence
  Synthetic
ccgttttttttttttagactccg

SEQ ID NO: 15891 - DNA, 23 bp, Artificial Sequence
  Synthetic
ccgttttttttttttcacacact

SEQ ID NO: 15892 - DNA, 23 bp, Artificial Sequence
  Synthetic
ccgttttttttttttagggagga

SEQ ID NO: 15893 - DNA, 23 bp, Artificial Sequence
  Synthetic
ccgttttttttttttcaagcttt

SEQ ID NO: 15894 - DNA, 23 bp, Artificial Sequence
  Synthetic
ccgttttttttttttacctgcac

SEQ ID NO: 15895 - DNA, 23 bp, Artificial Sequence
  Synthetic
ccgttttttttttttaagtgctc

SEQ ID NO: 15896 - DNA, 23 bp, Artificial Sequence
  Synthetic
ccgttttttttttttcctgcact

SEQ ID NO: 15897 - DNA, 23 bp, Artificial Sequence
  Synthetic
ccgttttttttttttagaagtgc

SEQ ID NO: 15898 - DNA, 23 bp, Artificial Sequence
  Synthetic
ccgttttttttttttaacatcag

SEQ ID NO: 15899 - DNA, 23 bp, Artificial Sequence
  Synthetic
ccgttttttttttttagccgctg

SEQ ID NO: 15900 - DNA, 23 bp, Artificial Sequence
  Synthetic
ccgttttttttttttggcaaagg

SEQ ID NO: 15901 - DNA, 23 bp, Artificial Sequence
  Synthetic
ccgttttttttttttgccgtgac

SEQ ID NO: 15902 - DNA, 23 bp, Artificial Sequence
  Synthetic
ccgttttttttttttgcctgtct

SEQ ID NO: 15903 - DNA, 23 bp, Artificial Sequence
  Synthetic
ccgttttttttttttctgtcaaa

SEQ ID NO: 15904 - DNA, 23 bp, Artificial Sequence
  Synthetic
ccgttttttttttttacagttgc

SEQ ID NO: 15905 - DNA, 23 bp, Artificial Sequence
  Synthetic
ccgttttttttttttccagtcag

SEQ ID NO: 15906 - DNA, 23 bp, Artificial Sequence
  Synthetic
ccgttttttttttttcatggtta

SEQ ID NO: 15907 - DNA, 23 bp, Artificial Sequence
  Synthetic
ccgttttttttttttgaattgcg

SEQ ID NO: 15908 - DNA, 23 bp, Artificial Sequence
  Synthetic
ccgttttttttttttcagttctt

SEQ ID NO: 15909 - DNA, 23 bp, Artificial Sequence
  Synthetic
ccgttttttttttttaagcttgc

SEQ ID NO: 15910 - DNA, 23 bp, Artificial Sequence
  Synthetic
ccgttttttttttttaaacccag

SEQ ID NO: 15911 - DNA, 23 bp, Artificial Sequence
  Synthetic
ccgttttttttttttagacccag

SEQ ID NO: 15912 - DNA, 23 bp, Artificial Sequence
  Synthetic
ccgttttttttttttgggtattt

SEQ ID NO: 15913 - DNA, 23 bp, Artificial Sequence
  Synthetic
ccgttttttttttttaacggaac

SEQ ID NO: 15914 - DNA, 23 bp, Artificial Sequence
  Synthetic
ccgttttttttttttgaaatccc

SEQ ID NO: 15915 - DNA, 23 bp, Artificial Sequence
  Synthetic
ccgttttttttttttgtaatccc

SEQ ID NO: 15916 - DNA, 23 bp, Artificial Sequence
  Synthetic
ccgttttttttttttgttcctgc

SEQ ID NO: 15917 - DNA, 23 bp, Artificial Sequence
  Synthetic
ccgttttttttttttagaccgag

SEQ ID NO: 15918 - DNA, 23 bp, Artificial Sequence
  Synthetic
ccgttttttttttttcctatcct

SEQ ID NO: 15919 - DNA, 23 bp, Artificial Sequence
  Synthetic
ccgttttttttttttacctatcc

SEQ ID NO: 15920 - DNA, 23 bp, Artificial Sequence
  Synthetic
ccgttttttttttttcggaactt

SEQ ID NO: 15921 - DNA, 23 bp, Artificial Sequence
  Synthetic
ccgttttttttttttcagaactt

SEQ ID NO: 15922 - DNA, 23 bp, Artificial Sequence
  Synthetic
ccgttttttttttttcaatagac

SEQ ID NO: 15923 - DNA, 23 bp, Artificial Sequence
  Synthetic
ccgttttttttttttaaaagtgc

SEQ ID NO: 15924 - DNA, 23 bp, Artificial Sequence
  Synthetic
ccgttttttttttttgcacacaa

SEQ ID NO: 15925 - DNA, 23 bp, Artificial Sequence
  Synthetic
ccgttttttttttttgagagggc

SEQ ID NO: 15926 - DNA, 23 bp, Artificial Sequence
  Synthetic
ccgttttttttttttcactcaaa

SEQ ID NO: 15927 - DNA, 23 bp, Artificial Sequence
  Synthetic
ccgttttttttttttaaaagagc

SEQ ID NO: 15928 - DNA, 23 bp, Artificial Sequence
  Synthetic
ccgttttttttttttcaggattg

SEQ ID NO: 15929 - DNA, 23 bp, Artificial Sequence
  Synthetic
ccgttttttttttttatgcatac

SEQ ID NO: 15930 - DNA, 23 bp, Artificial Sequence
  Synthetic
ccgttttttttttttgaagaaca

SEQ ID NO: 15931 - DNA, 23 bp, Artificial Sequence
  Synthetic
ccgttttttttttttgtatgtgg

SEQ ID NO: 15932 - DNA, 23 bp, Artificial Sequence
  Synthetic
ccgttttttttttttaccgattt

SEQ ID NO: 15933 - DNA, 23 bp, Artificial Sequence
  Synthetic
ccgttttttttttttacactgat

SEQ ID NO: 15934 - DNA, 23 bp, Artificial Sequence
  Synthetic
ccgttttttttttttccgatttc

SEQ ID NO: 15935 - DNA, 23 bp, Artificial Sequence
  Synthetic
ccgttttttttttttaacaccag

SEQ ID NO: 15936 - DNA, 23 bp, Artificial Sequence
  Synthetic
ccgttttttttttttaagagagc

SEQ ID NO: 15937 - DNA, 23 bp, Artificial Sequence
  Synthetic
ccgttttttttttttgctttgac

SEQ ID NO: 15938 - DNA, 23 bp, Artificial Sequence
  Synthetic
ccgttttttttttttctgcaaac

SEQ ID NO: 15939 - DNA, 23 bp, Artificial Sequence
  Synthetic
ccgttttttttttttccagtcga

SEQ ID NO: 15940 - DNA, 23 bp, Artificial Sequence
  Synthetic
ccgttttttttttttgctgagtg

SEQ ID NO: 15941 - DNA, 23 bp, Artificial Sequence
  Synthetic
ccgttttttttttttctgagagt

SEQ ID NO: 15942 - DNA, 23 bp, Artificial Sequence
  Synthetic
ccgttttttttttttccagtcgg

SEQ ID NO: 15943 - DNA, 23 bp, Artificial Sequence
  Synthetic
ccgttttttttttttcagtcaag

SEQ ID NO: 15944 - DNA, 23 bp, Artificial Sequence
  Synthetic
ccgttttttttttttagctatgc

SEQ ID NO: 15945 - DNA, 23 bp, Artificial Sequence
  Synthetic
ccgttttttttttttcaacttag

SEQ ID NO: 15946 - DNA, 23 bp, Artificial Sequence
  Synthetic
ccgttttttttttttgccctctc

SEQ ID NO: 15947 - DNA, 23 bp, Artificial Sequence
  Synthetic
ccgttttttttttttgcagcgct

SEQ ID NO: 15948 - DNA, 23 bp, Artificial Sequence
  Synthetic
ccgttttttttttttgaggtcga

SEQ ID NO: 15949 - DNA, 23 bp, Artificial Sequence
  Synthetic
ccgttttttttttttcagcagca

SEQ ID NO: 15950 - DNA, 23 bp, Artificial Sequence
  Synthetic
ccgttttttttttttcaccaatg

SEQ ID NO: 15951 - DNA, 23 bp, Artificial Sequence
  Synthetic
ccgttttttttttttcacttact

SEQ ID NO: 15952 - DNA, 23 bp, Artificial Sequence
  Synthetic
ccgttttttttttttctggagga

SEQ ID NO: 15953 - DNA, 23 bp, Artificial Sequence
  Synthetic
ccgttttttttttttccctcatg

SEQ ID NO: 15954 - DNA, 23 bp, Artificial Sequence
  Synthetic
ccgttttttttttttcggaaggg

SEQ ID NO: 15955 - DNA, 23 bp, Artificial Sequence
  Synthetic
ccgttttttttttttaaaaggtt

SEQ ID NO: 15956 - DNA, 23 bp, Artificial Sequence
  Synthetic
ccgttttttttttttaatgcaac

SEQ ID NO: 15957 - DNA, 23 bp, Artificial Sequence
  Synthetic
ccgttttttttttttctgcaggc

SEQ ID NO: 15958 - DNA, 23 bp, Artificial Sequence
  Synthetic
ccgttttttttttttaggatagg

SEQ ID NO: 15959 - DNA, 23 bp, Artificial Sequence
  Synthetic
ccgttttttttttttaaagtaac

SEQ ID NO: 15960 - DNA, 23 bp, Artificial Sequence
  Synthetic
ccgttttttttttttcatttttc

SEQ ID NO: 15961 - DNA, 23 bp, Artificial Sequence
  Synthetic
ccgttttttttttttgactagat

SEQ ID NO: 15962 - DNA, 23 bp, Artificial Sequence
  Synthetic
ccgttttttttttttaaggcatc

SEQ ID NO: 15963 - DNA, 23 bp, Artificial Sequence
  Synthetic
ccgttttttttttttaacaaaat

SEQ ID NO: 15964 - DNA, 23 bp, Artificial Sequence
  Synthetic
ccgttttttttttttagctcctg

SEQ ID NO: 15965 - DNA, 23 bp, Artificial Sequence
  Synthetic
ccgttttttttttttgctataaa

SEQ ID NO: 15966 - DNA, 23 bp, Artificial Sequence
  Synthetic
ccgttttttttttttctgaccga

SEQ ID NO: 15967 - DNA, 23 bp, Artificial Sequence
  Synthetic
ccgttttttttttttacgggtgc

SEQ ID NO: 15968 - DNA, 23 bp, Artificial Sequence
  Synthetic
ccgttttttttttttgggcacac

SEQ ID NO: 15969 - DNA, 23 bp, Artificial Sequence
  Synthetic
ccgttttttttttttcggtcagg

SEQ ID NO: 15970 - DNA, 23 bp, Artificial Sequence
  Synthetic
ccgttttttttttttcactggac

SEQ ID NO: 15971 - DNA, 23 bp, Artificial Sequence
  Synthetic
ccgttttttttttttgaggcagg

SEQ ID NO: 15972 - DNA, 23 bp, Artificial Sequence
  Synthetic
ccgttttttttttttggcgaccc

SEQ ID NO: 15973 - DNA, 23 bp, Artificial Sequence
  Synthetic
ccgttttttttttttgaggttaa

SEQ ID NO: 15974 - DNA, 23 bp, Artificial Sequence
  Synthetic
ccgttttttttttttacaaccag

SEQ ID NO: 15975 - DNA, 23 bp, Artificial Sequence
  Synthetic
ccgttttttttttttaatcagct

SEQ ID NO: 15976 - DNA, 23 bp, Artificial Sequence
  Synthetic
ccgttttttttttttcaatcagc

SEQ ID NO: 15977 - DNA, 23 bp, Artificial Sequence
  Synthetic
ccgttttttttttttgaaagtgt

SEQ ID NO: 15978 - DNA, 23 bp, Artificial Sequence
  Synthetic
ccgttttttttttttaggctcaa

SEQ ID NO: 15979 - DNA, 23 bp, Artificial Sequence
  Synthetic
ccgttttttttttttctatgcaa

SEQ ID NO: 15980 - DNA, 23 bp, Artificial Sequence
  Synthetic
ccgttttttttttttacccctgg

SEQ ID NO: 15981 - DNA, 23 bp, Artificial Sequence
  Synthetic
ccgttttttttttttcagatgga

SEQ ID NO: 15982 - DNA, 23 bp, Artificial Sequence
  Synthetic
ccgttttttttttttaattgcat

SEQ ID NO: 15983 - DNA, 23 bp, Artificial Sequence
  Synthetic
ccgttttttttttttaaggattt

SEQ ID NO: 15984 - DNA, 23 bp, Artificial Sequence
  Synthetic
ccgttttttttttttagatcaac

SEQ ID NO: 15985 - DNA, 23 bp, Artificial Sequence
  Synthetic
ccgttttttttttttgaatataa

SEQ ID NO: 15986 - DNA, 23 bp, Artificial Sequence
  Synthetic
ccgttttttttttttaccaggtt

SEQ ID NO: 15987 - DNA, 23 bp, Artificial Sequence
  Synthetic
ccgttttttttttttacttagca

SEQ ID NO: 15988 - DNA, 23 bp, Artificial Sequence
  Synthetic
ccgttttttttttttgtggattt

SEQ ID NO: 15989 - DNA, 23 bp, Artificial Sequence
  Synthetic
ccgttttttttttttcatagaag

SEQ ID NO: 15990 - DNA, 23 bp, Artificial Sequence
  Synthetic
ccgttttttttttttgtggatgt

SEQ ID NO: 15991 - DNA, 23 bp, Artificial Sequence
  Synthetic
ccgttttttttttttaccataga

SEQ ID NO: 15992 - DNA, 23 bp, Artificial Sequence
  Synthetic
ccgttttttttttttgtgaaatt

SEQ ID NO: 15993 - DNA, 23 bp, Artificial Sequence
  Synthetic
ccgttttttttttttcaaaagtt

SEQ ID NO: 15994 - DNA, 23 bp, Artificial Sequence
  Synthetic
ccgttttttttttttcacaggac

SEQ ID NO: 15995 - DNA, 23 bp, Artificial Sequence
  Synthetic
ccgttttttttttttcgttccat

SEQ ID NO: 15996 - DNA, 23 bp, Artificial Sequence
  Synthetic
ccgttttttttttttagagcttg

SEQ ID NO: 15997 - DNA, 23 bp, Artificial Sequence
  Synthetic
ccgttttttttttttaatccacc

SEQ ID NO: 15998 - DNA, 23 bp, Artificial Sequence
  Synthetic
ccgttttttttttttagtgttgt

SEQ ID NO: 15999 - DNA, 23 bp, Artificial Sequence
  Synthetic
ccgttttttttttttgccacagt

SEQ ID NO: 16000 - DNA, 23 bp, Artificial Sequence
  Synthetic
ccgttttttttttttgggttcac

SEQ ID NO: 16001 - DNA, 23 bp, Artificial Sequence
  Synthetic
ccgttttttttttttaaagttgc

SEQ ID NO: 16002 - DNA, 23 bp, Artificial Sequence
  Synthetic
ccgttttttttttttcggctagt

SEQ ID NO: 16003 - DNA, 23 bp, Artificial Sequence
  Synthetic
ccgttttttttttttaacaaaca

SEQ ID NO: 16004 - DNA, 23 bp, Artificial Sequence
  Synthetic
ccgttttttttttttccttctga

SEQ ID NO: 16005 - DNA, 23 bp, Artificial Sequence
  Synthetic
ccgttttttttttttcaaaacat

SEQ ID NO: 16006 - DNA, 23 bp, Artificial Sequence
  Synthetic
ccgttttttttttttcggcatta

SEQ ID NO: 16007 - DNA, 23 bp, Artificial Sequence
  Synthetic
ccgttttttttttttcatgacgg

SEQ ID NO: 16008 - DNA, 23 bp, Artificial Sequence
  Synthetic
ccgttttttttttttcaccgagg

SEQ ID NO: 16009 - DNA, 23 bp, Artificial Sequence
  Synthetic
ccgttttttttttttgggacatc

SEQ ID NO: 16010 - DNA, 23 bp, Artificial Sequence
  Synthetic
ccgttttttttttttccagctaa

SEQ ID NO: 16011 - DNA, 23 bp, Artificial Sequence
  Synthetic
ccgttttttttttttattaggaa

SEQ ID NO: 16012 - DNA, 23 bp, Artificial Sequence
  Synthetic
ccgttttttttttttactcagta

SEQ ID NO: 16013 - DNA, 23 bp, Artificial Sequence
  Synthetic
ccgttttttttttttcaagacgg

SEQ ID NO: 16014 - DNA, 23 bp, Artificial Sequence
  Synthetic
ccgttttttttttttaattcatc

SEQ ID NO: 16015 - DNA, 23 bp, Artificial Sequence
  Synthetic
ccgttttttttttttgtggatga

SEQ ID NO: 16016 - DNA, 23 bp, Artificial Sequence
  Synthetic
ccgttttttttttttctgccata

SEQ ID NO: 16017 - DNA, 23 bp, Artificial Sequence
  Synthetic
ccgttttttttttttggcacaca

SEQ ID NO: 16018 - DNA, 23 bp, Artificial Sequence
  Synthetic
ccgttttttttttttggtttccc

SEQ ID NO: 16019 - DNA, 23 bp, Artificial Sequence
  Synthetic
ccgttttttttttttcaaaccac

SEQ ID NO: 16020 - DNA, 23 bp, Artificial Sequence
  Synthetic
ccgttttttttttttaacatcac

SEQ ID NO: 16021 - DNA, 23 bp, Artificial Sequence
  Synthetic
ccgttttttttttttacccaggg

SEQ ID NO: 16022 - DNA, 23 bp, Artificial Sequence
  Synthetic
ccgttttttttttttagtactgt

SEQ ID NO: 16023 - DNA, 23 bp, Artificial Sequence
  Synthetic
ccgttttttttttttgaaaccag

SEQ ID NO: 16024 - DNA, 23 bp, Artificial Sequence
  Synthetic
ccgttttttttttttcacaccaa

SEQ ID NO: 16025 - DNA, 23 bp, Artificial Sequence
  Synthetic
ccgttttttttttttcaggatcg

SEQ ID NO: 16026 - DNA, 23 bp, Artificial Sequence
  Synthetic
ccgttttttttttttgaccaaca

SEQ ID NO: 16027 - DNA, 23 bp, Artificial Sequence
  Synthetic
ccgttttttttttttagttatca

SEQ ID NO: 16028 - DNA, 23 bp, Artificial Sequence
  Synthetic
ccgttttttttttttgtgacatg

SEQ ID NO: 16029 - DNA, 23 bp, Artificial Sequence
  Synthetic
ccgttttttttttttgaagtgca

SEQ ID NO: 16030 - DNA, 23 bp, Artificial Sequence
  Synthetic
ccgttttttttttttggctgggg

SEQ ID NO: 16031 - DNA, 23 bp, Artificial Sequence
  Synthetic
ccgttttttttttttacaaaatc

SEQ ID NO: 16032 - DNA, 23 bp, Artificial Sequence
  Synthetic
ccgttttttttttttggcagact

SEQ ID NO: 16033 - DNA, 23 bp, Artificial Sequence
  Synthetic
ccgttttttttttttacaaaatc

SEQ ID NO: 16034 - DNA, 23 bp, Artificial Sequence
  Synthetic
ccgttttttttttttatacagct

SEQ ID NO: 16035 - DNA, 23 bp, Artificial Sequence
  Synthetic
ccgttttttttttttaggccggg

SEQ ID NO: 16036 - DNA, 23 bp, Artificial Sequence
  Synthetic
ccgttttttttttttacctgcac

SEQ ID NO: 16037 - DNA, 23 bp, Artificial Sequence
  Synthetic
ccgttttttttttttgcaaaaat

SEQ ID NO: 16038 - DNA, 23 bp, Artificial Sequence
  Synthetic
ccgttttttttttttacaataca

SEQ ID NO: 16039 - DNA, 23 bp, Artificial Sequence
  Synthetic
ccgttttttttttttacaagatc

SEQ ID NO: 16040 - DNA, 23 bp, Artificial Sequence
  Synthetic
ccgttttttttttttgcaaggtc

SEQ ID NO: 16041 - DNA, 23 bp, Artificial Sequence
  Synthetic
ccgttttttttttttgctcactc

SEQ ID NO: 16042 - DNA, 23 bp, Artificial Sequence
  Synthetic
ccgttttttttttttgctcactc

SEQ ID NO: 16043 - DNA, 23 bp, Artificial Sequence
  Synthetic
ccgttttttttttttgctcactc

SEQ ID NO: 16044 - DNA, 23 bp, Artificial Sequence
  Synthetic
ccgttttttttttttgctctctc

SEQ ID NO: 16045 - DNA, 23 bp, Artificial Sequence
  Synthetic
ccgttttttttttttgctcgctc

SEQ ID NO: 16046 - DNA, 23 bp, Artificial Sequence
  Synthetic
ccgttttttttttttagagctcc

SEQ ID NO: 16047 - DNA, 23 bp, Artificial Sequence
  Synthetic
ccgttttttttttttggagctcc

SEQ ID NO: 16048 - DNA, 23 bp, Artificial Sequence
  Synthetic
ccgttttttttttttgcatacag

SEQ ID NO: 16049 - DNA, 23 bp, Artificial Sequence
  Synthetic
ccgttttttttttttgcatacag

SEQ ID NO: 16050 - DNA, 23 bp, Artificial Sequence
  Synthetic
ccgttttttttttttgcatacag

SEQ ID NO: 16051 - DNA, 23 bp, Artificial Sequence
  Synthetic
ccgttttttttttttgcatacag

SEQ ID NO: 16052 - DNA, 23 bp, Artificial Sequence
  Synthetic
ccgttttttttttttgcatacag

SEQ ID NO: 16053 - DNA, 23 bp, Artificial Sequence
  Synthetic
ccgttttttttttttcacgtgcc

SEQ ID NO: 16054 - DNA, 23 bp, Artificial Sequence
  Synthetic
ccgttttttttttttgcacgtgc

SEQ ID NO: 16055 - DNA, 23 bp, Artificial Sequence
  Synthetic
ccgttttttttttttcacgtgtc

SEQ ID NO: 16056 - DNA, 23 bp, Artificial Sequence
  Synthetic
ccgttttttttttttggaatgaa

SEQ ID NO: 16057 - DNA, 23 bp, Artificial Sequence
  Synthetic
ccgttttttttttttggaatgaa

SEQ ID NO: 16058 - DNA, 23 bp, Artificial Sequence
  Synthetic
ccgttttttttttttggaatgaa

SEQ ID NO: 16059 - DNA, 23 bp, Artificial Sequence
  Synthetic
ccgttttttttttttggaatgaa

SEQ ID NO: 16060 - DNA, 23 bp, Artificial Sequence
  Synthetic
ccgttttttttttttgggattga

SEQ ID NO: 16061 - DNA, 23 bp, Artificial Sequence
  Synthetic
ccgttttttttttttaggaatga

SEQ ID NO: 16062 - DNA, 23 bp, Artificial Sequence
  Synthetic
ccgttttttttttttgggattga

SEQ ID NO: 16063 - DNA, 23 bp, Artificial Sequence
  Synthetic
ccgttttttttttttgatcatgc

SEQ ID NO: 16064 - DNA, 23 bp, Artificial Sequence
  Synthetic
ccgttttttttttttgatcatgc

SEQ ID NO: 16065 - DNA, 23 bp, Artificial Sequence
  Synthetic
ccgttttttttttttagatcatg

SEQ ID NO: 16066 - DNA, 23 bp, Artificial Sequence
  Synthetic
ccgttttttttttttagatcatg

SEQ ID NO: 16067 - DNA, 23 bp, Artificial Sequence
  Synthetic
ccgttttttttttttagatcatg

SEQ ID NO: 16068 - DNA, 23 bp, Artificial Sequence
  Synthetic
ccgttttttttttttagatcatg

SEQ ID NO: 16069 - DNA, 23 bp, Artificial Sequence
  Synthetic
ccgttttttttttttagatcatg

SEQ ID NO: 16070 - DNA, 23 bp, Artificial Sequence
  Synthetic
ccgttttttttttttcccgatct

SEQ ID NO: 16071 - DNA, 23 bp, Artificial Sequence
  Synthetic
ccgttttttttttttggcaagtc

SEQ ID NO: 16072 - DNA, 23 bp, Artificial Sequence
  Synthetic
ccgttttttttttttcggcaagt

SEQ ID NO: 16073 - DNA, 23 bp, Artificial Sequence
  Synthetic
ccgttttttttttttggcaagtc

SEQ ID NO: 16074 - DNA, 23 bp, Artificial Sequence
  Synthetic
ccgttttttttttttggcaagtc

SEQ ID NO: 16075 - DNA, 23 bp, Artificial Sequence
  Synthetic
ccgttttttttttttaggcaagt

SEQ ID NO: 16076 - DNA, 23 bp, Artificial Sequence
  Synthetic
ccgttttttttttttaggcaagt

SEQ ID NO: 16077 - DNA, 23 bp, Artificial Sequence
  Synthetic
ccgttttttttttttaggcaagt

SEQ ID NO: 16078 - DNA, 23 bp, Artificial Sequence
  Synthetic
ccgttttttttttttaggcaagt

SEQ ID NO: 16079 - DNA, 23 bp, Artificial Sequence
  Synthetic
ccgttttttttttttggcaagtc

SEQ ID NO: 16080 - DNA, 23 bp, Artificial Sequence
  Synthetic
ccgttttttttttttatattggc

SEQ ID NO: 16081 - DNA, 23 bp, Artificial Sequence
  Synthetic
ccgttttttttttttatattggc

SEQ ID NO: 16082 - DNA, 23 bp, Artificial Sequence
  Synthetic
ccgttttttttttttatattggc

SEQ ID NO: 16083 - DNA, 23 bp, Artificial Sequence
  Synthetic
ccgttttttttttttatattggc

SEQ ID NO: 16084 - DNA, 23 bp, Artificial Sequence
  Synthetic
ccgttttttttttttgtgatatt

SEQ ID NO: 16085 - DNA, 23 bp, Artificial Sequence
  Synthetic
ccgttttttttttttgtgatatt

SEQ ID NO: 16086 - DNA, 23 bp, Artificial Sequence
  Synthetic
ccgttttttttttttcagcatca

SEQ ID NO: 16087 - DNA, 23 bp, Artificial Sequence
  Synthetic
ccgttttttttttttcagcatca

SEQ ID NO: 16088 - DNA, 23 bp, Artificial Sequence
  Synthetic
ccgttttttttttttcagcatca

SEQ ID NO: 16089 - DNA, 23 bp, Artificial Sequence
  Synthetic
ccgttttttttttttcagcatca

SEQ ID NO: 16090 - DNA, 23 bp, Artificial Sequence
  Synthetic
ccgttttttttttttgcagcatc

SEQ ID NO: 16091 - DNA, 23 bp, Artificial Sequence
  Synthetic
ccgttttttttttttggagcacc

SEQ ID NO: 16092 - DNA, 23 bp, Artificial Sequence
  Synthetic
ccgttttttttttttatcaatgc

SEQ ID NO: 16093 - DNA, 23 bp, Artificial Sequence
  Synthetic
ccgttttttttttttgaggtgga

SEQ ID NO: 16094 - DNA, 23 bp, Artificial Sequence
  Synthetic
ccgttttttttttttgaggtgga

SEQ ID NO: 16095 - DNA, 23 bp, Artificial Sequence
  Synthetic
ccgttttttttttttagttcccc

SEQ ID NO: 16096 - DNA, 23 bp, Artificial Sequence
  Synthetic
ccgttttttttttttagttcccc

SEQ ID NO: 16097 - DNA, 23 bp, Artificial Sequence
  Synthetic
ccgttttttttttttagttcccc

SEQ ID NO: 16098 - DNA, 23 bp, Artificial Sequence
  Synthetic
ccgttttttttttttagttcccc

SEQ ID NO: 16099 - DNA, 23 bp, Artificial Sequence
  Synthetic
ccgttttttttttttagttcccc

SEQ ID NO: 16100 - DNA, 23 bp, Artificial Sequence
  Synthetic
ccgttttttttttttagttcccc

SEQ ID NO: 16101 - DNA, 23 bp, Artificial Sequence
  Synthetic
ccgttttttttttttagttcaag

SEQ ID NO: 16102 - DNA, 23 bp, Artificial Sequence
  Synthetic
ccgttttttttttttagttcaag

SEQ ID NO: 16103 - DNA, 23 bp, Artificial Sequence
  Synthetic
ccgttttttttttttagttcaag

SEQ ID NO: 16104 - DNA, 23 bp, Artificial Sequence
  Synthetic
ccgttttttttttttagggcaat

SEQ ID NO: 16105 - DNA, 23 bp, Artificial Sequence
  Synthetic
ccgttttttttttttagggcagc

SEQ ID NO: 16106 - DNA, 23 bp, Artificial Sequence
  Synthetic
ccgttttttttttttagggcaat

SEQ ID NO: 16107 - DNA, 23 bp, Artificial Sequence
  Synthetic
ccgttttttttttttagggcaac

SEQ ID NO: 16108 - DNA, 23 bp, Artificial Sequence
  Synthetic
ccgttttttttttttgggcaaat

SEQ ID NO: 16109 - DNA, 23 bp, Artificial Sequence
  Synthetic
ccgttttttttttttgggcaaat

SEQ ID NO: 16110 - DNA, 23 bp, Artificial Sequence
  Synthetic
ccgttttttttttttggggcaaa

SEQ ID NO: 16111 - DNA, 23 bp, Artificial Sequence
  Synthetic
ccgttttttttttttagggcaat

SEQ ID NO: 16112 - DNA, 23 bp, Artificial Sequence
  Synthetic
ccgttttttttttttagggcaac

SEQ ID NO: 16113 - DNA, 23 bp, Artificial Sequence
  Synthetic
ccgttttttttttttacaagttc

SEQ ID NO: 16114 - DNA, 23 bp, Artificial Sequence
  Synthetic
ccgttttttttttttcagttatc

SEQ ID NO: 16115 - DNA, 23 bp, Artificial Sequence
  Synthetic
ccgttttttttttttcaggagtc

SEQ ID NO: 16116 - DNA, 23 bp, Artificial Sequence
  Synthetic
ccgttttttttttttctacctgc

SEQ ID NO: 16117 - DNA, 23 bp, Artificial Sequence
  Synthetic
ccgttttttttttttctgcactg

SEQ ID NO: 16118 - DNA, 23 bp, Artificial Sequence
  Synthetic
ccgttttttttttttacaaattc

SEQ ID NO: 16119 - DNA, 23 bp, Artificial Sequence
  Synthetic
ccgttttttttttttacaagtta

SEQ ID NO: 16120 - DNA, 23 bp, Artificial Sequence
  Synthetic
ccgttttttttttttgccaagct

SEQ ID NO: 16121 - DNA, 23 bp, Artificial Sequence
  Synthetic
ccgttttttttttttaaagagac

SEQ ID NO: 16122 - DNA, 23 bp, Artificial Sequence
  Synthetic
ccgttttttttttttcagctggt

SEQ ID NO: 16123 - DNA, 23 bp, Artificial Sequence
  Synthetic
ccgttttttttttttcagaagca

SEQ ID NO: 16124 - DNA, 23 bp, Artificial Sequence
  Synthetic
ccgttttttttttttacaaacca

SEQ ID NO: 16125 - DNA, 23 bp, Artificial Sequence
  Synthetic
ccgttttttttttttgccaatat

SEQ ID NO: 16126 - DNA, 23 bp, Artificial Sequence
  Synthetic
ccgttttttttttttcaagtgcc

SEQ ID NO: 16127 - DNA, 23 bp, Artificial Sequence
  Synthetic
ccgttttttttttttctacctgc

SEQ ID NO: 16128 - DNA, 23 bp, Artificial Sequence
  Synthetic
ccgttttttttttttctgcacta

SEQ ID NO: 16129 - DNA, 23 bp, Artificial Sequence
  Synthetic
ccgttttttttttttctcaccga

SEQ ID NO: 16130 - DNA, 23 bp, Artificial Sequence
  Synthetic
ccgttttttttttttagtgaatt

SEQ ID NO: 16131 - DNA, 23 bp, Artificial Sequence
  Synthetic
ccgttttttttttttgagctccc

SEQ ID NO: 16132 - DNA, 23 bp, Artificial Sequence
  Synthetic
ccgttttttttttttaacaggta

SEQ ID NO: 16133 - DNA, 23 bp, Artificial Sequence
  Synthetic
ccgttttttttttttagttttgc

SEQ ID NO: 16134 - DNA, 23 bp, Artificial Sequence
  Synthetic
ccgttttttttttttagttttgc

SEQ ID NO: 16135 - DNA, 23 bp, Artificial Sequence
  Synthetic
ccgttttttttttttcctgcact

SEQ ID NO: 16136 - DNA, 23 bp, Artificial Sequence
  Synthetic
ccgttttttttttttggcatagg

SEQ ID NO: 16137 - DNA, 23 bp, Artificial Sequence
  Synthetic
ccgttttttttttttgcctgtct

SEQ ID NO: 16138 - DNA, 23 bp, Artificial Sequence
  Synthetic
ccgttttttttttttcatggtta

SEQ ID NO: 16139 - DNA, 23 bp, Artificial Sequence
  Synthetic
ccgttttttttttttcagttctt

SEQ ID NO: 16140 - DNA, 23 bp, Artificial Sequence
  Synthetic
ccgttttttttttttgggtattt

SEQ ID NO: 16141 - DNA, 23 bp, Artificial Sequence
  Synthetic
ccgttttttttttttgaaatccc

SEQ ID NO: 16142 - DNA, 23 bp, Artificial Sequence
  Synthetic
ccgttttttttttttgcggaact

SEQ ID NO: 16143 - DNA, 23 bp, Artificial Sequence
  Synthetic
ccgttttttttttttcaatagac

SEQ ID NO: 16144 - DNA, 23 bp, Artificial Sequence
  Synthetic
ccgttttttttttttaccgattt

SEQ ID NO: 16145 - DNA, 23 bp, Artificial Sequence
  Synthetic
ccgttttttttttttctgatttc

SEQ ID NO: 16146 - DNA, 23 bp, Artificial Sequence
  Synthetic
ccgttttttttttttcaacttag

SEQ ID NO: 16147 - DNA, 23 bp, Artificial Sequence
  Synthetic
ccgttttttttttttcaaccagc

SEQ ID NO: 16148 - DNA, 23 bp, Artificial Sequence
  Synthetic
ccgttttttttttttacaaaatc

SEQ ID NO: 16149 - DNA, 23 bp, Artificial Sequence
  Synthetic
ccgttttttttttttcaggccgg

SEQ ID NO: 16150 - DNA, 23 bp, Artificial Sequence
  Synthetic
ccgttttttttttttacctgcac

SEQ ID NO: 16151 - DNA, 23 bp, Artificial Sequence
  Synthetic
ccgttttttttttttctcaataa

SEQ ID NO: 16152 - DNA, 23 bp, Artificial Sequence
  Synthetic
ccgttttttttttttcaaaaatg

SEQ ID NO: 16153 - DNA, 23 bp, Artificial Sequence
  Synthetic
ccgttttttttttttcagctttc

SEQ ID NO: 16154 - DNA, 23 bp, Artificial Sequence
  Synthetic
ccgttttttttttttcagctttc

SEQ ID NO: 16155 - DNA, 23 bp, Artificial Sequence
  Synthetic
ccgttttttttttttaaagcttt

SEQ ID NO: 16156 - DNA, 23 bp, Artificial Sequence
  Synthetic
ccgttttttttttttgtcatcca

SEQ ID NO: 16157 - DNA, 23 bp, Artificial Sequence
  Synthetic
ccgttttttttttttgtcatcca

SEQ ID NO: 16158 - DNA, 23 bp, Artificial Sequence
  Synthetic
ccgttttttttttttagaagaca

SEQ ID NO: 16159 - DNA, 23 bp, Artificial Sequence
  Synthetic
ccgttttttttttttaccttttg

SEQ ID NO: 16160 - DNA, 23 bp, Artificial Sequence
  Synthetic
ccgttttttttttttcacagtcg

SEQ ID NO: 16161 - DNA, 23 bp, Artificial Sequence
  Synthetic
ccgttttttttttttaaactcgg

SEQ ID NO: 16162 - DNA, 23 bp, Artificial Sequence
  Synthetic
ccgttttttttttttaccttgaa

SEQ ID NO: 16163 - DNA, 23 bp, Artificial Sequence
  Synthetic
ccgttttttttttttgactcctg

SEQ ID NO: 16164 - DNA, 23 bp, Artificial Sequence
  Synthetic
ccgttttttttttttagcattca

SEQ ID NO: 16165 - DNA, 23 bp, Artificial Sequence
  Synthetic
ccgttttttttttttagcattca

SEQ ID NO: 16166 - DNA, 23 bp, Artificial Sequence
  Synthetic
ccgttttttttttttgcattcac

SEQ ID NO: 16167 - DNA, 23 bp, Artificial Sequence
  Synthetic
ccgttttttttttttcaaaggtc

SEQ ID NO: 16168 - DNA, 23 bp, Artificial Sequence
  Synthetic
ccgttttttttttttgcagtcaa

SEQ ID NO: 16169 - DNA, 23 bp, Artificial Sequence
  Synthetic
ccgttttttttttttcctgatac

SEQ ID NO: 16170 - DNA, 23 bp, Artificial Sequence
  Synthetic
ccgttttttttttttggcatatt

SEQ ID NO: 16171 - DNA, 23 bp, Artificial Sequence
  Synthetic
ccgttttttttttttctctttag

SEQ ID NO: 16172 - DNA, 23 bp, Artificial Sequence
  Synthetic
ccgttttttttttttctggttga

SEQ ID NO: 16173 - DNA, 23 bp, Artificial Sequence
  Synthetic
ccgttttttttttttcttagcaa

SEQ ID NO: 16174 - DNA, 23 bp, Artificial Sequence
  Synthetic
ccgttttttttttttaccaatta

SEQ ID NO: 16175 - DNA, 23 bp, Artificial Sequence
  Synthetic
ccgttttttttttttgatatgct

SEQ ID NO: 16176 - DNA, 23 bp, Artificial Sequence
  Synthetic
ccgttttttttttttaccaataa

SEQ ID NO: 16177 - DNA, 23 bp, Artificial Sequence
  Synthetic
ccgttttttttttttcacgatac

SEQ ID NO: 16178 - DNA, 23 bp, Artificial Sequence
  Synthetic
ccgttttttttttttgcatattt

SEQ ID NO: 16179 - DNA, 23 bp, Artificial Sequence
  Synthetic
ccgttttttttttttaccataat

SEQ ID NO: 16180 - DNA, 23 bp, Artificial Sequence
  Synthetic
ccgttttttttttttacactatt

SEQ ID NO: 16181 - DNA, 23 bp, Artificial Sequence
  Synthetic
ccgttttttttttttagaactgc

SEQ ID NO: 16182 - DNA, 23 bp, Artificial Sequence
  Synthetic
ccgttttttttttttcatatccg

SEQ ID NO: 16183 - DNA, 23 bp, Artificial Sequence
  Synthetic
ccgttttttttttttggccagat

SEQ ID NO: 16184 - DNA, 23 bp, Artificial Sequence
  Synthetic
ccgttttttttttttaagctgca

SEQ ID NO: 16185 - DNA, 23 bp, Artificial Sequence
  Synthetic
ccgttttttttttttcataccag

SEQ ID NO: 16186 - DNA, 23 bp, Artificial Sequence
  Synthetic
ccgttttttttttttggccagat

SEQ ID NO: 16187 - DNA, 23 bp, Artificial Sequence
  Synthetic
ccgttttttttttttgaatgtta

SEQ ID NO: 16188 - DNA, 23 bp, Artificial Sequence
  Synthetic
ccgttttttttttttaagagcat

SEQ ID NO: 16189 - DNA, 23 bp, Artificial Sequence
  Synthetic
ccgttttttttttttcctcatga

SEQ ID NO: 16190 - DNA, 23 bp, Artificial Sequence
  Synthetic
ccgttttttttttttgcgttcca

SEQ ID NO: 16191 - DNA, 23 bp, Artificial Sequence
  Synthetic
ccgttttttttttttatcacaac

SEQ ID NO: 16192 - DNA, 23 bp, Artificial Sequence
  Synthetic
ccgttttttttttttctcatcaa

SEQ ID NO: 16193 - DNA, 23 bp, Artificial Sequence
  Synthetic
ccgttttttttttttgacaacca

SEQ ID NO: 16194 - DNA, 23 bp, Artificial Sequence
  Synthetic
ccgttttttttttttgatcatca

SEQ ID NO: 16195 - DNA, 23 bp, Artificial Sequence
  Synthetic
ccgttttttttttttgacatcaa

SEQ ID NO: 16196 - DNA, 23 bp, Artificial Sequence
  Synthetic
ccgttttttttttttagttatgc

SEQ ID NO: 16197 - DNA, 23 bp, Artificial Sequence
  Synthetic
ccgttttttttttttagctatgc

SEQ ID NO: 16198 - DNA, 23 bp, Artificial Sequence
  Synthetic
ccgttttttttttttatgaatgt

SEQ ID NO: 16199 - DNA, 23 bp, Artificial Sequence
  Synthetic
ccgttttttttttttaaccaagt

SEQ ID NO: 16200 - DNA, 23 bp, Artificial Sequence
  Synthetic
ccgttttttttttttcagtaagt

SEQ ID NO: 16201 - DNA, 23 bp, Artificial Sequence
  Synthetic
ccgttttttttttttccctcgtt

SEQ ID NO: 16202 - DNA, 23 bp, Artificial Sequence
  Synthetic
ccgttttttttttttctcactac

SEQ ID NO: 16203 - DNA, 23 bp, Artificial Sequence
  Synthetic
ccgttttttttttttcccactac

SEQ ID NO: 16204 - DNA, 23 bp, Artificial Sequence
  Synthetic
ccgttttttttttttgaaaaaca

SEQ ID NO: 16205 - DNA, 23 bp, Artificial Sequence
  Synthetic
ccgttttttttttttctcactac

SEQ ID NO: 16206 - DNA, 23 bp, Artificial Sequence
  Synthetic
ccgttttttttttttcacagctc

SEQ ID NO: 16207 - DNA, 23 bp, Artificial Sequence
  Synthetic
ccgttttttttttttcccgatat

SEQ ID NO: 16208 - DNA, 23 bp, Artificial Sequence
  Synthetic
ccgttttttttttttcttcaatt

SEQ ID NO: 16209 - DNA, 23 bp, Artificial Sequence
  Synthetic
ccgttttttttttttcattacac

SEQ ID NO: 16210 - DNA, 23 bp, Artificial Sequence
  Synthetic
ccgttttttttttttccaccgag

SEQ ID NO: 16211 - DNA, 23 bp, Artificial Sequence
  Synthetic
ccgttttttttttttgaactgga

SEQ ID NO: 16212 - DNA, 23 bp, Artificial Sequence
  Synthetic
ccgttttttttttttcatggcca

SEQ ID NO: 16213 - DNA, 23 bp, Artificial Sequence
  Synthetic
ccgttttttttttttaaccacca

SEQ ID NO: 16214 - DNA, 23 bp, Artificial Sequence
  Synthetic
ccgttttttttttttagatcaca

SEQ ID NO: 16215 - DNA, 23 bp, Artificial Sequence
  Synthetic
ccgttttttttttttgtaataac

SEQ ID NO: 16216 - DNA, 23 bp, Artificial Sequence
  Synthetic
ccgttttttttttttgtgaaata

SEQ ID NO: 16217 - DNA, 23 bp, Artificial Sequence
  Synthetic
ccgttttttttttttatccaaat

SEQ ID NO: 16218 - DNA, 23 bp, Artificial Sequence
  Synthetic
ccgttttttttttttcactttgg

SEQ ID NO: 16219 - DNA, 23 bp, Artificial Sequence
  Synthetic
ccgttttttttttttaactaaat

SEQ ID NO: 16220 - DNA, 23 bp, Artificial Sequence
  Synthetic
ccgttttttttttttcaacgaaa

SEQ ID NO: 16221 - DNA, 23 bp, Artificial Sequence
  Synthetic
ccgttttttttttttagcaaatc

SEQ ID NO: 16222 - DNA, 23 bp, Artificial Sequence
  Synthetic
ccgttttttttttttgcatcgtt

SEQ ID NO: 16223 - DNA, 23 bp, Artificial Sequence
  Synthetic
ccgttttttttttttcacttgaa

SEQ ID NO: 16224 - DNA, 23 bp, Artificial Sequence
  Synthetic
ccgttttttttttttcatttgaa

SEQ ID NO: 16225 - DNA, 23 bp, Artificial Sequence
  Synthetic
ccgttttttttttttataattaa

SEQ ID NO: 16226 - DNA, 23 bp, Artificial Sequence
  Synthetic
ccgttttttttttttgctcactc

SEQ ID NO: 16227 - DNA, 23 bp, Artificial Sequence
  Synthetic
ccgttttttttttttagagctcc

SEQ ID NO: 16228 - DNA, 23 bp, Artificial Sequence
  Synthetic
ccgttttttttttttagagctcc

SEQ ID NO: 16229 - DNA, 23 bp, Artificial Sequence
  Synthetic
ccgttttttttttttggagctcc

SEQ ID NO: 16230 - DNA, 23 bp, Artificial Sequence
  Synthetic
ccgttttttttttttagagctcc

SEQ ID NO: 16231 - DNA, 23 bp, Artificial Sequence
  Synthetic
ccgttttttttttttagagctcc

SEQ ID NO: 16232 - DNA, 23 bp, Artificial Sequence
  Synthetic
ccgttttttttttttagatcatg

SEQ ID NO: 16233 - DNA, 23 bp, Artificial Sequence
  Synthetic
ccgttttttttttttagatcatg

SEQ ID NO: 16234 - DNA, 23 bp, Artificial Sequence
  Synthetic
ccgttttttttttttcccgatct

SEQ ID NO: 16235 - DNA, 23 bp, Artificial Sequence
  Synthetic
ccgttttttttttttcccgatct

SEQ ID NO: 16236 - DNA, 23 bp, Artificial Sequence
  Synthetic
ccgttttttttttttagttcaag

SEQ ID NO: 16237 - DNA, 23 bp, Artificial Sequence
  Synthetic
ccgttttttttttttccagggaa

SEQ ID NO: 16238 - DNA, 23 bp, Artificial Sequence
  Synthetic
ccgttttttttttttccagggaa

SEQ ID NO: 16239 - DNA, 23 bp, Artificial Sequence
  Synthetic
ccgttttttttttttccagggaa

SEQ ID NO: 16240 - DNA, 23 bp, Artificial Sequence
  Synthetic
ccgttttttttttttccagggaa

SEQ ID NO: 16241 - DNA, 23 bp, Artificial Sequence
  Synthetic
ccgttttttttttttccagggaa

SEQ ID NO: 16242 - DNA, 23 bp, Artificial Sequence
  Synthetic
ccgttttttttttttaccataca

SEQ ID NO: 16243 - DNA, 23 bp, Artificial Sequence
  Synthetic
ccgttttttttttttactataca

SEQ ID NO: 16244 - DNA, 23 bp, Artificial Sequence
  Synthetic
ccgttttttttttttgcacaaac

SEQ ID NO: 16245 - DNA, 23 bp, Artificial Sequence
  Synthetic
ccgttttttttttttatagccct

SEQ ID NO: 16246 - DNA, 23 bp, Artificial Sequence
  Synthetic
ccgttttttttttttcaggagtc

SEQ ID NO: 16247 - DNA, 23 bp, Artificial Sequence
  Synthetic
ccgttttttttttttaaggagtc

SEQ ID NO: 16248 - DNA, 23 bp, Artificial Sequence
  Synthetic
ccgttttttttttttctacctgc

SEQ ID NO: 16249 - DNA, 23 bp, Artificial Sequence
  Synthetic
ccgttttttttttttatagccct

SEQ ID NO: 16250 - DNA, 23 bp, Artificial Sequence
  Synthetic
ccgttttttttttttcaaacacc

SEQ ID NO: 16251 - DNA, 23 bp, Artificial Sequence
  Synthetic
ccgttttttttttttgcattcac

SEQ ID NO: 16252 - DNA, 23 bp, Artificial Sequence
  Synthetic
ccgttttttttttttacaagtta

SEQ ID NO: 16253 - DNA, 23 bp, Artificial Sequence
  Synthetic
ccgttttttttttttaaagagac

SEQ ID NO: 16254 - DNA, 23 bp, Artificial Sequence
  Synthetic
ccgttttttttttttacatagga

SEQ ID NO: 16255 - DNA, 23 bp, Artificial Sequence
  Synthetic
ccgttttttttttttcatcatca

SEQ ID NO: 16256 - DNA, 23 bp, Artificial Sequence
  Synthetic
ccgttttttttttttgacacgtg

SEQ ID NO: 16257 - DNA, 23 bp, Artificial Sequence
  Synthetic
ccgttttttttttttaccatagg

SEQ ID NO: 16258 - DNA, 23 bp, Artificial Sequence
  Synthetic
ccgttttttttttttagggattc

SEQ ID NO: 16259 - DNA, 23 bp, Artificial Sequence
  Synthetic
ccgttttttttttttcaaagttc

SEQ ID NO: 16260 - DNA, 23 bp, Artificial Sequence
  Synthetic
ccgttttttttttttacttttgt

SEQ ID NO: 16261 - DNA, 23 bp, Artificial Sequence
  Synthetic
ccgttttttttttttaaaccatg

SEQ ID NO: 16262 - DNA, 23 bp, Artificial Sequence
  Synthetic
ccgttttttttttttctgcacta

SEQ ID NO: 16263 - DNA, 23 bp, Artificial Sequence
  Synthetic
ccgttttttttttttacccaccg

SEQ ID NO: 16264 - DNA, 23 bp, Artificial Sequence
  Synthetic
ccgttttttttttttctcaccga

SEQ ID NO: 16265 - DNA, 23 bp, Artificial Sequence
  Synthetic
ccgttttttttttttagtgaatt

SEQ ID NO: 16266 - DNA, 23 bp, Artificial Sequence
  Synthetic
ccgttttttttttttcccttatc

SEQ ID NO: 16267 - DNA, 23 bp, Artificial Sequence
  Synthetic
ccgttttttttttttagcccaaa

SEQ ID NO: 16268 - DNA, 23 bp, Artificial Sequence
  Synthetic
ccgttttttttttttcaacaaca

SEQ ID NO: 16269 - DNA, 23 bp, Artificial Sequence
  Synthetic
ccgttttttttttttagttttgc

SEQ ID NO: 16270 - DNA, 23 bp, Artificial Sequence
  Synthetic
ccgttttttttttttcctgcact

SEQ ID NO: 16271 - DNA, 23 bp, Artificial Sequence
  Synthetic
ccgttttttttttttggcatagg

SEQ ID NO: 16272 - DNA, 23 bp, Artificial Sequence
  Synthetic
ccgttttttttttttagactccg

SEQ ID NO: 16273 - DNA, 23 bp, Artificial Sequence
  Synthetic
ccgttttttttttttaacatcag

SEQ ID NO: 16274 - DNA, 23 bp, Artificial Sequence
  Synthetic
ccgttttttttttttgcctgtct

SEQ ID NO: 16275 - DNA, 23 bp, Artificial Sequence
  Synthetic
ccgttttttttttttacagttgc

SEQ ID NO: 16276 - DNA, 23 bp, Artificial Sequence
  Synthetic
ccgttttttttttttccaatcag

SEQ ID NO: 16277 - DNA, 23 bp, Artificial Sequence
  Synthetic
ccgttttttttttttaacggaac

SEQ ID NO: 16278 - DNA, 23 bp, Artificial Sequence
  Synthetic
ccgttttttttttttgaaatccc

SEQ ID NO: 16279 - DNA, 23 bp, Artificial Sequence
  Synthetic
ccgttttttttttttgttcctgc

SEQ ID NO: 16280 - DNA, 23 bp, Artificial Sequence
  Synthetic
ccgttttttttttttgcctatcc

SEQ ID NO: 16281 - DNA, 23 bp, Artificial Sequence
  Synthetic
ccgttttttttttttcggaactt

SEQ ID NO: 16282 - DNA, 23 bp, Artificial Sequence
  Synthetic
ccgttttttttttttcaatagag

SEQ ID NO: 16283 - DNA, 23 bp, Artificial Sequence
  Synthetic
ccgttttttttttttctgatttc

SEQ ID NO: 16284 - DNA, 23 bp, Artificial Sequence
  Synthetic
ccgttttttttttttaccgattt

SEQ ID NO: 16285 - DNA, 23 bp, Artificial Sequence
  Synthetic
ccgttttttttttttctttgaca

SEQ ID NO: 16286 - DNA, 23 bp, Artificial Sequence
  Synthetic
ccgttttttttttttctgagagt

SEQ ID NO: 16287 - DNA, 23 bp, Artificial Sequence
  Synthetic
ccgttttttttttttcaacttag

SEQ ID NO: 16288 - DNA, 23 bp, Artificial Sequence
  Synthetic
ccgttttttttttttgaggtcga

SEQ ID NO: 16289 - DNA, 23 bp, Artificial Sequence
  Synthetic
ccgttttttttttttcacttact

SEQ ID NO: 16290 - DNA, 23 bp, Artificial Sequence
  Synthetic
ccgttttttttttttggaggaag

SEQ ID NO: 16291 - DNA, 23 bp, Artificial Sequence
  Synthetic
ccgttttttttttttacaaaatc

SEQ ID NO: 16292 - DNA, 23 bp, Artificial Sequence
  Synthetic
ccgttttttttttttatacagct

SEQ ID NO: 16293 - DNA, 23 bp, Artificial Sequence
  Synthetic
ccgttttttttttttatacagct

SEQ ID NO: 16294 - DNA, 23 bp, Artificial Sequence
  Synthetic
ccgttttttttttttctcaataa

SEQ ID NO: 16295 - DNA, 23 bp, Artificial Sequence
  Synthetic
ccgttttttttttttctcagggc

SEQ ID NO: 16296 - DNA, 23 bp, Artificial Sequence
  Synthetic
ccgttttttttttttaggctcat

SEQ ID NO: 16297 - DNA, 23 bp, Artificial Sequence
  Synthetic
ccgttttttttttttactataca

SEQ ID NO: 16298 - DNA, 23 bp, Artificial Sequence
  Synthetic
ccgttttttttttttaccacaca

SEQ ID NO: 16299 - DNA, 23 bp, Artificial Sequence
  Synthetic
ccgttttttttttttaccataca

SEQ ID NO: 16300 - DNA, 23 bp, Artificial Sequence
  Synthetic
ccgttttttttttttactattca

SEQ ID NO: 16301 - DNA, 23 bp, Artificial Sequence
  Synthetic
ccgttttttttttttactataca

SEQ ID NO: 16302 - DNA, 23 bp, Artificial Sequence
  Synthetic
ccgttttttttttttacaacaca

SEQ ID NO: 16303 - DNA, 23 bp, Artificial Sequence
  Synthetic
ccgttttttttttttacagcaca

SEQ ID NO: 16304 - DNA, 23 bp, Artificial Sequence
  Synthetic
ccgttttttttttttactgtaca

SEQ ID NO: 16305 - DNA, 23 bp, Artificial Sequence
  Synthetic
ccgttttttttttttacatactt

SEQ ID NO: 16306 - DNA, 23 bp, Artificial Sequence
  Synthetic
ccgttttttttttttacaagttc

SEQ ID NO: 16307 - DNA, 23 bp, Artificial Sequence
  Synthetic
ccgttttttttttttcagttatc

SEQ ID NO: 16308 - DNA, 23 bp, Artificial Sequence
  Synthetic
ccgttttttttttttcagttatc

SEQ ID NO: 16309 - DNA, 23 bp, Artificial Sequence
  Synthetic
ccgttttttttttttatagccct

SEQ ID NO: 16310 - DNA, 23 bp, Artificial Sequence
  Synthetic
ccgttttttttttttatagccct

SEQ ID NO: 16311 - DNA, 23 bp, Artificial Sequence
  Synthetic
ccgttttttttttttacaaattc

SEQ ID NO: 16312 - DNA, 23 bp, Artificial Sequence
  Synthetic
ccgttttttttttttcaaatccg

SEQ ID NO: 16313 - DNA, 23 bp, Artificial Sequence
  Synthetic
ccgttttttttttttacacacat

SEQ ID NO: 16314 - DNA, 23 bp, Artificial Sequence
  Synthetic
ccgttttttttttttaaacacca

SEQ ID NO: 16315 - DNA, 23 bp, Artificial Sequence
  Synthetic
ccgttttttttttttgcattcac

SEQ ID NO: 16316 - DNA, 23 bp, Artificial Sequence
  Synthetic
ccgttttttttttttacaggtta

SEQ ID NO: 16317 - DNA, 23 bp, Artificial Sequence
  Synthetic
ccgttttttttttttacaagtta

SEQ ID NO: 16318 - DNA, 23 bp, Artificial Sequence
  Synthetic
ccgttttttttttttcattatta

SEQ ID NO: 16319 - DNA, 23 bp, Artificial Sequence
  Synthetic
ccgttttttttttttaaagagac

SEQ ID NO: 16320 - DNA, 23 bp, Artificial Sequence
  Synthetic
ccgttttttttttttgcaagccc

SEQ ID NO: 16321 - DNA, 23 bp, Artificial Sequence
  Synthetic
ccgttttttttttttgccctttt

SEQ ID NO: 16322 - DNA, 23 bp, Artificial Sequence
  Synthetic
ccgttttttttttttgaccatgg

SEQ ID NO: 16323 - DNA, 23 bp, Artificial Sequence
  Synthetic
ccgttttttttttttagctggtt

SEQ ID NO: 16324 - DNA, 23 bp, Artificial Sequence
  Synthetic
ccgttttttttttttacatagga

SEQ ID NO: 16325 - DNA, 23 bp, Artificial Sequence
  Synthetic
ccgttttttttttttagatagga

SEQ ID NO: 16326 - DNA, 23 bp, Artificial Sequence
  Synthetic
ccgttttttttttttcgcgtatt

SEQ ID NO: 16327 - DNA, 23 bp, Artificial Sequence
  Synthetic
ccgttttttttttttgcctgatt

SEQ ID NO: 16328 - DNA, 23 bp, Artificial Sequence
  Synthetic
ccgttttttttttttaccatagg

SEQ ID NO: 16329 - DNA, 23 bp, Artificial Sequence
  Synthetic
ccgttttttttttttgtagtgct

SEQ ID NO: 16330 - DNA, 23 bp, Artificial Sequence
  Synthetic
ccgttttttttttttgtagtgct

SEQ ID NO: 16331 - DNA, 23 bp, Artificial Sequence
  Synthetic
ccgttttttttttttgtacatca

SEQ ID NO: 16332 - DNA, 23 bp, Artificial Sequence
  Synthetic
ccgttttttttttttcaaagttc

SEQ ID NO: 16333 - DNA, 23 bp, Artificial Sequence
  Synthetic
ccgttttttttttttcaaagttc

SEQ ID NO: 16334 - DNA, 23 bp, Artificial Sequence
  Synthetic
ccgttttttttttttatcacttt

SEQ ID NO: 16335 - DNA, 23 bp, Artificial Sequence
  Synthetic
ccgttttttttttttctcatttt

SEQ ID NO: 16336 - DNA, 23 bp, Artificial Sequence
  Synthetic
ccgttttttttttttacaaacca

SEQ ID NO: 16337 - DNA, 23 bp, Artificial Sequence
  Synthetic
ccgttttttttttttcaaaccat

SEQ ID NO: 16338 - DNA, 23 bp, Artificial Sequence
  Synthetic
ccgttttttttttttccaatatt

SEQ ID NO: 16339 - DNA, 23 bp, Artificial Sequence
  Synthetic
ccgttttttttttttcctgcact

SEQ ID NO: 16340 - DNA, 23 bp, Artificial Sequence
  Synthetic
ccgttttttttttttctgcacta

SEQ ID NO: 16341 - DNA, 23 bp, Artificial Sequence
  Synthetic
ccgttttttttttttctcaccga

SEQ ID NO: 16342 - DNA, 23 bp, Artificial Sequence
  Synthetic
ccgttttttttttttgtacaatc

SEQ ID NO: 16343 - DNA, 23 bp, Artificial Sequence
  Synthetic
ccgttttttttttttccaccgac

SEQ ID NO: 16344 - DNA, 23 bp, Artificial Sequence
  Synthetic
ccgttttttttttttgttggcaa

SEQ ID NO: 16345 - DNA, 23 bp, Artificial Sequence
  Synthetic
ccgttttttttttttagtgaatt

SEQ ID NO: 16346 - DNA, 23 bp, Artificial Sequence
  Synthetic
ccgttttttttttttccttatca

SEQ ID NO: 16347 - DNA, 23 bp, Artificial Sequence
  Synthetic
ccgttttttttttttgctgcaac

SEQ ID NO: 16348 - DNA, 23 bp, Artificial Sequence
  Synthetic
ccgttttttttttttcctaatat

SEQ ID NO: 16349 - DNA, 23 bp, Artificial Sequence
  Synthetic
ccgttttttttttttgctgtcaa

SEQ ID NO: 16350 - DNA, 23 bp, Artificial Sequence
  Synthetic
ccgttttttttttttctgggact

SEQ ID NO: 16351 - DNA, 23 bp, Artificial Sequence
  Synthetic
ccgttttttttttttcacatgga

SEQ ID NO: 16352 - DNA, 23 bp, Artificial Sequence
  Synthetic
ccgttttttttttttccaacaac

SEQ ID NO: 16353 - DNA, 23 bp, Artificial Sequence
  Synthetic
ccgttttttttttttccaacaac

SEQ ID NO: 16354 - DNA, 23 bp, Artificial Sequence
  Synthetic
ccgttttttttttttaacaggta

SEQ ID NO: 16355 - DNA, 23 bp, Artificial Sequence
  Synthetic
ccgttttttttttttagttttgc

SEQ ID NO: 16356 - DNA, 23 bp, Artificial Sequence
  Synthetic
ccgttttttttttttagttttgc

SEQ ID NO: 16357 - DNA, 23 bp, Artificial Sequence
  Synthetic
ccgttttttttttttacctgcac

SEQ ID NO: 16358 - DNA, 23 bp, Artificial Sequence
  Synthetic
ccgttttttttttttcatcgtta

SEQ ID NO: 16359 - DNA, 23 bp, Artificial Sequence
  Synthetic
ccgttttttttttttatcattac

SEQ ID NO: 16360 - DNA, 23 bp, Artificial Sequence
  Synthetic
ccgttttttttttttccatgccc

SEQ ID NO: 16361 - DNA, 23 bp, Artificial Sequence
  Synthetic
ccgttttttttttttaagtggtc

SEQ ID NO: 16362 - DNA, 23 bp, Artificial Sequence
  Synthetic
ccgttttttttttttggcatagg

SEQ ID NO: 16363 - DNA, 23 bp, Artificial Sequence
  Synthetic
ccgttttttttttttggcatagg

SEQ ID NO: 16364 - DNA, 23 bp, Artificial Sequence
  Synthetic
ccgttttttttttttagactccg

SEQ ID NO: 16365 - DNA, 23 bp, Artificial Sequence
  Synthetic
ccgttttttttttttccaacacc

SEQ ID NO: 16366 - DNA, 23 bp, Artificial Sequence
  Synthetic
ccgttttttttttttgccgctgt

SEQ ID NO: 16367 - DNA, 23 bp, Artificial Sequence
  Synthetic
ccgttttttttttttgccatgac

SEQ ID NO: 16368 - DNA, 23 bp, Artificial Sequence
  Synthetic
ccgttttttttttttgcctgtct

SEQ ID NO: 16369 - DNA, 23 bp, Artificial Sequence
  Synthetic
ccgttttttttttttacagttgc

SEQ ID NO: 16370 - DNA, 23 bp, Artificial Sequence
  Synthetic
ccgttttttttttttacagttgc

SEQ ID NO: 16371 - DNA, 23 bp, Artificial Sequence
  Synthetic
ccgttttttttttttcaatcagt

SEQ ID NO: 16372 - DNA, 23 bp, Artificial Sequence
  Synthetic
ccgttttttttttttacatggtt

SEQ ID NO: 16373 - DNA, 23 bp, Artificial Sequence
  Synthetic
ccgttttttttttttcatggtta

SEQ ID NO: 16374 - DNA, 23 bp, Artificial Sequence
  Synthetic
ccgttttttttttttagaattgc

SEQ ID NO: 16375 - DNA, 23 bp, Artificial Sequence
  Synthetic
ccgttttttttttttaaacccag

SEQ ID NO: 16376 - DNA, 23 bp, Artificial Sequence
  Synthetic
ccgttttttttttttagacccag

SEQ ID NO: 16377 - DNA, 23 bp, Artificial Sequence
  Synthetic
ccgttttttttttttgggtattt

SEQ ID NO: 16378 - DNA, 23 bp, Artificial Sequence
  Synthetic
ccgttttttttttttcagttctt

SEQ ID NO: 16379 - DNA, 23 bp, Artificial Sequence
  Synthetic
ccgttttttttttttcagctctt

SEQ ID NO: 16380 - DNA, 23 bp, Artificial Sequence
  Synthetic
ccgttttttttttttgaaatccc

SEQ ID NO: 16381 - DNA, 23 bp, Artificial Sequence
  Synthetic
ccgttttttttttttgtaatccc

SEQ ID NO: 16382 - DNA, 23 bp, Artificial Sequence
  Synthetic
ccgttttttttttttgttcctgc

SEQ ID NO: 16383 - DNA, 23 bp, Artificial Sequence
  Synthetic
ccgttttttttttttagaccgag

SEQ ID NO: 16384 - DNA, 23 bp, Artificial Sequence
  Synthetic
ccgttttttttttttgcctatcc

SEQ ID NO: 16385 - DNA, 23 bp, Artificial Sequence
  Synthetic
ccgttttttttttttcagaactt

SEQ ID NO: 16386 - DNA, 23 bp, Artificial Sequence
  Synthetic
ccgttttttttttttcagaactt

SEQ ID NO: 16387 - DNA, 23 bp, Artificial Sequence
  Synthetic
ccgttttttttttttactgaact

SEQ ID NO: 16388 - DNA, 23 bp, Artificial Sequence
  Synthetic
ccgttttttttttttaccgattt

SEQ ID NO: 16389 - DNA, 23 bp, Artificial Sequence
  Synthetic
ccgttttttttttttcactgatt

SEQ ID NO: 16390 - DNA, 23 bp, Artificial Sequence
  Synthetic
ccgttttttttttttatgacaat

SEQ ID NO: 16391 - DNA, 23 bp, Artificial Sequence
  Synthetic
ccgttttttttttttgctgagtg

SEQ ID NO: 16392 - DNA, 23 bp, Artificial Sequence
  Synthetic
ccgttttttttttttcgagagtg

SEQ ID NO: 16393 - DNA, 23 bp, Artificial Sequence
  Synthetic
ccgttttttttttttccagtcgg

SEQ ID NO: 16394 - DNA, 23 bp, Artificial Sequence
  Synthetic
ccgttttttttttttaacaaaat

SEQ ID NO: 16395 - DNA, 23 bp, Artificial Sequence
  Synthetic
ccgttttttttttttaaggattt

SEQ ID NO: 16396 - DNA, 23 bp, Artificial Sequence
  Synthetic
ccgttttttttttttacgcgagc

SEQ ID NO: 16397 - DNA, 23 bp, Artificial Sequence
  Synthetic
ccgttttttttttttcggcatta

SEQ ID NO: 16398 - DNA, 23 bp, Artificial Sequence
  Synthetic
ccgttttttttttttgatgtagt

SEQ ID NO: 16399 - DNA, 23 bp, Artificial Sequence
  Synthetic
ccgttttttttttttcagaacca

SEQ ID NO: 16400 - DNA, 23 bp, Artificial Sequence
  Synthetic
ccgttttttttttttatccacat

SEQ ID NO: 16401 - DNA, 23 bp, Artificial Sequence
  Synthetic
ccgttttttttttttcagccgta

SEQ ID NO: 16402 - DNA, 23 bp, Artificial Sequence
  Synthetic
ccgttttttttttttcaacaaaa

SEQ ID NO: 16403 - DNA, 23 bp, Artificial Sequence
  Synthetic
ccgttttttttttttatacagct

SEQ ID NO: 16404 - DNA, 23 bp, Artificial Sequence
  Synthetic
ccgttttttttttttcaggccgg

SEQ ID NO: 16405 - DNA, 23 bp, Artificial Sequence
  Synthetic
ccgttttttttttttgcaaaaat

SEQ ID NO: 16406 - DNA, 23 bp, Artificial Sequence
  Synthetic
ccgttttttttttttcagctggt

SEQ ID NO: 16407 - DNA, 23 bp, Artificial Sequence
  Synthetic
ccgttttttttttttaactgcac

SEQ ID NO: 16408 - DNA, 23 bp, Artificial Sequence
  Synthetic
ccgttttttttttttagttttgc

SEQ ID NO: 16409 - DNA, 23 bp, Artificial Sequence
  Synthetic
ccgttttttttttttacctgcac

SEQ ID NO: 16410 - DNA, 23 bp, Artificial Sequence
  Synthetic
ccgttttttttttttgcccaaaa

SEQ ID NO: 16411 - DNA, 23 bp, Artificial Sequence
  Synthetic
ccgttttttttttttaaccgaac

SEQ ID NO: 16412 - DNA, 23 bp, Artificial Sequence
  Synthetic
ccgttttttttttttggcattac

SEQ ID NO: 16413 - DNA, 23 bp, Artificial Sequence
  Synthetic
ccgttttttttttttactataca

SEQ ID NO: 16414 - DNA, 23 bp, Artificial Sequence
  Synthetic
ccgttttttttttttactacaca

SEQ ID NO: 16415 - DNA, 23 bp, Artificial Sequence
  Synthetic
ccgttttttttttttaccataca

SEQ ID NO: 16416 - DNA, 23 bp, Artificial Sequence
  Synthetic
ccgttttttttttttactaaaca

SEQ ID NO: 16417 - DNA, 23 bp, Artificial Sequence
  Synthetic
ccgttttttttttttctatacaa

SEQ ID NO: 16418 - DNA, 23 bp, Artificial Sequence
  Synthetic
ccgttttttttttttctgtacaa

SEQ ID NO: 16419 - DNA, 23 bp, Artificial Sequence
  Synthetic
ccgttttttttttttcagcacaa

SEQ ID NO: 16420 - DNA, 23 bp, Artificial Sequence
  Synthetic
ccgttttttttttttacaagttc

SEQ ID NO: 16421 - DNA, 23 bp, Artificial Sequence
  Synthetic
ccgttttttttttttcagttatc

SEQ ID NO: 16422 - DNA, 23 bp, Artificial Sequence
  Synthetic
ccgttttttttttttatagccct

SEQ ID NO: 16423 - DNA, 23 bp, Artificial Sequence
  Synthetic
ccgttttttttttttacctgcac

SEQ ID NO: 16424 - DNA, 23 bp, Artificial Sequence
  Synthetic
ccgttttttttttttatagccct

SEQ ID NO: 16425 - DNA, 23 bp, Artificial Sequence
  Synthetic
ccgttttttttttttacaaattc

SEQ ID NO: 16426 - DNA, 23 bp, Artificial Sequence
  Synthetic
ccgttttttttttttcaaattcg

SEQ ID NO: 16427 - DNA, 23 bp, Artificial Sequence
  Synthetic
ccgttttttttttttcaaattcg

SEQ ID NO: 16428 - DNA, 23 bp, Artificial Sequence
  Synthetic
ccgttttttttttttcaaacacc

SEQ ID NO: 16429 - DNA, 23 bp, Artificial Sequence
  Synthetic
ccgttttttttttttgcattcac

SEQ ID NO: 16430 - DNA, 23 bp, Artificial Sequence
  Synthetic
ccgttttttttttttacaggtta

SEQ ID NO: 16431 - DNA, 23 bp, Artificial Sequence
  Synthetic
ccgttttttttttttacaagtta

SEQ ID NO: 16432 - DNA, 23 bp, Artificial Sequence
  Synthetic
ccgttttttttttttcattatta

SEQ ID NO: 16433 - DNA, 23 bp, Artificial Sequence
  Synthetic
ccgttttttttttttgcgtacca

SEQ ID NO: 16434 - DNA, 23 bp, Artificial Sequence
  Synthetic
ccgttttttttttttaaagagac

SEQ ID NO: 16435 - DNA, 23 bp, Artificial Sequence
  Synthetic
ccgttttttttttttcaagccca

SEQ ID NO: 16436 - DNA, 23 bp, Artificial Sequence
  Synthetic
ccgttttttttttttgccctttt

SEQ ID NO: 16437 - DNA, 23 bp, Artificial Sequence
  Synthetic
ccgttttttttttttgccctttc

SEQ ID NO: 16438 - DNA, 23 bp, Artificial Sequence
  Synthetic
ccgttttttttttttgccctttt

SEQ ID NO: 16439 - DNA, 23 bp, Artificial Sequence
  Synthetic
ccgttttttttttttgaccatgg

SEQ ID NO: 16440 - DNA, 23 bp, Artificial Sequence
  Synthetic
ccgttttttttttttcagctggt

SEQ ID NO: 16441 - DNA, 23 bp, Artificial Sequence
  Synthetic
ccgttttttttttttgctggttg

SEQ ID NO: 16442 - DNA, 23 bp, Artificial Sequence
  Synthetic
ccgttttttttttttcagctggt

SEQ ID NO: 16443 - DNA, 23 bp, Artificial Sequence
  Synthetic
ccgttttttttttttcggctggt

SEQ ID NO: 16444 - DNA, 23 bp, Artificial Sequence
  Synthetic
ccgttttttttttttacatagga

SEQ ID NO: 16445 - DNA, 23 bp, Artificial Sequence
  Synthetic
ccgttttttttttttacgcgtat

SEQ ID NO: 16446 - DNA, 23 bp, Artificial Sequence
  Synthetic
ccgttttttttttttattcacaa

SEQ ID NO: 16447 - DNA, 23 bp, Artificial Sequence
  Synthetic
ccgttttttttttttgacacatg

SEQ ID NO: 16448 - DNA, 23 bp, Artificial Sequence
  Synthetic
ccgttttttttttttaccatagg

SEQ ID NO: 16449 - DNA, 23 bp, Artificial Sequence
  Synthetic
ccgttttttttttttcataaagt

SEQ ID NO: 16450 - DNA, 23 bp, Artificial Sequence
  Synthetic
ccgttttttttttttagtgcttt

SEQ ID NO: 16451 - DNA, 23 bp, Artificial Sequence
  Synthetic
ccgttttttttttttgagctaca

SEQ ID NO: 16452 - DNA, 23 bp, Artificial Sequence
  Synthetic
ccgttttttttttttgtacatca

SEQ ID NO: 16453 - DNA, 23 bp, Artificial Sequence
  Synthetic
ccgttttttttttttagggattc

SEQ ID NO: 16454 - DNA, 23 bp, Artificial Sequence
  Synthetic
ccgttttttttttttacctatgg

SEQ ID NO: 16455 - DNA, 23 bp, Artificial Sequence
  Synthetic
ccgttttttttttttcaaagttc

SEQ ID NO: 16456 - DNA, 23 bp, Artificial Sequence
  Synthetic
ccgttttttttttttcaaagttc

SEQ ID NO: 16457 - DNA, 23 bp, Artificial Sequence
  Synthetic
ccgttttttttttttctggtaca

SEQ ID NO: 16458 - DNA, 23 bp, Artificial Sequence
  Synthetic
ccgttttttttttttacttttgt

SEQ ID NO: 16459 - DNA, 23 bp, Artificial Sequence
  Synthetic
ccgttttttttttttccctatca

SEQ ID NO: 16460 - DNA, 23 bp, Artificial Sequence
  Synthetic
ccgttttttttttttacaaacca

SEQ ID NO: 16461 - DNA, 23 bp, Artificial Sequence
  Synthetic
ccgttttttttttttcaaatcat

SEQ ID NO: 16462 - DNA, 23 bp, Artificial Sequence
  Synthetic
ccgttttttttttttcaaaccat

SEQ ID NO: 16463 - DNA, 23 bp, Artificial Sequence
  Synthetic
ccgttttttttttttaccaatat

SEQ ID NO: 16464 - DNA, 23 bp, Artificial Sequence
  Synthetic
ccgttttttttttttcccaatat

SEQ ID NO: 16465 - DNA, 23 bp, Artificial Sequence
  Synthetic
ccgttttttttttttccagtatt

SEQ ID NO: 16466 - DNA, 23 bp, Artificial Sequence
  Synthetic
ccgttttttttttttcaagtgcc

SEQ ID NO: 16467 - DNA, 23 bp, Artificial Sequence
  Synthetic
ccgttttttttttttctacctgc

SEQ ID NO: 16468 - DNA, 23 bp, Artificial Sequence
  Synthetic
ccgttttttttttttctcaccga

SEQ ID NO: 16469 - DNA, 23 bp, Artificial Sequence
  Synthetic
ccgttttttttttttacagtcaa

SEQ ID NO: 16470 - DNA, 23 bp, Artificial Sequence
  Synthetic
ccgttttttttttttccaccgac

SEQ ID NO: 16471 - DNA, 23 bp, Artificial Sequence
  Synthetic
ccgttttttttttttgagttcta

SEQ ID NO: 16472 - DNA, 23 bp, Artificial Sequence
  Synthetic
ccgttttttttttttgttggcaa

SEQ ID NO: 16473 - DNA, 23 bp, Artificial Sequence
  Synthetic
ccgttttttttttttagtgaatt

SEQ ID NO: 16474 - DNA, 23 bp, Artificial Sequence
  Synthetic
ccgttttttttttttgccttatc

SEQ ID NO: 16475 - DNA, 23 bp, Artificial Sequence
  Synthetic
ccgttttttttttttgctgcaac

SEQ ID NO: 16476 - DNA, 23 bp, Artificial Sequence
  Synthetic
ccgttttttttttttctgatatc

SEQ ID NO: 16477 - DNA, 23 bp, Artificial Sequence
  Synthetic
ccgttttttttttttctgcacta

SEQ ID NO: 16478 - DNA, 23 bp, Artificial Sequence
  Synthetic
ccgttttttttttttaactgcac

SEQ ID NO: 16479 - DNA, 23 bp, Artificial Sequence
  Synthetic
ccgttttttttttttgctgcttt

SEQ ID NO: 16480 - DNA, 23 bp, Artificial Sequence
  Synthetic
ccgttttttttttttgctgtcaa

SEQ ID NO: 16481 - DNA, 23 bp, Artificial Sequence
  Synthetic
ccgttttttttttttaagcggga

SEQ ID NO: 16482 - DNA, 23 bp, Artificial Sequence
  Synthetic
ccgttttttttttttcacatgga

SEQ ID NO: 16483 - DNA, 23 bp, Artificial Sequence
  Synthetic
ccgttttttttttttcaacaaca

SEQ ID NO: 16484 - DNA, 23 bp, Artificial Sequence
  Synthetic
ccgttttttttttttcaacaaca

SEQ ID NO: 16485 - DNA, 23 bp, Artificial Sequence
  Synthetic
ccgttttttttttttaacaggta

SEQ ID NO: 16486 - DNA, 23 bp, Artificial Sequence
  Synthetic
ccgttttttttttttaccaatgt

SEQ ID NO: 16487 - DNA, 23 bp, Artificial Sequence
  Synthetic
ccgttttttttttttaacacgta

SEQ ID NO: 16488 - DNA, 23 bp, Artificial Sequence
  Synthetic
ccgttttttttttttagttttgc

SEQ ID NO: 16489 - DNA, 23 bp, Artificial Sequence
  Synthetic
ccgttttttttttttagttttgc

SEQ ID NO: 16490 - DNA, 23 bp, Artificial Sequence
  Synthetic
ccgttttttttttttcatacttc

SEQ ID NO: 16491 - DNA, 23 bp, Artificial Sequence
  Synthetic
ccgttttttttttttcatacttc

SEQ ID NO: 16492 - DNA, 23 bp, Artificial Sequence
  Synthetic
ccgttttttttttttcatcgtta

SEQ ID NO: 16493 - DNA, 23 bp, Artificial Sequence
  Synthetic
ccgttttttttttttcatcatta

SEQ ID NO: 16494 - DNA, 23 bp, Artificial Sequence
  Synthetic
ccgttttttttttttccatgccc

SEQ ID NO: 16495 - DNA, 23 bp, Artificial Sequence
  Synthetic
ccgttttttttttttaagaggta

SEQ ID NO: 16496 - DNA, 23 bp, Artificial Sequence
  Synthetic
ccgttttttttttttaagtggtc

SEQ ID NO: 16497 - DNA, 23 bp, Artificial Sequence
  Synthetic
ccgttttttttttttggcatagg

SEQ ID NO: 16498 - DNA, 23 bp, Artificial Sequence
  Synthetic
ccgttttttttttttagactccg

SEQ ID NO: 16499 - DNA, 23 bp, Artificial Sequence
  Synthetic
ccgttttttttttttaggatccg

SEQ ID NO: 16500 - DNA, 23 bp, Artificial Sequence
  Synthetic
ccgttttttttttttcacacact

SEQ ID NO: 16501 - DNA, 23 bp, Artificial Sequence
  Synthetic
ccgttttttttttttcaagcttt

SEQ ID NO: 16502 - DNA, 23 bp, Artificial Sequence
  Synthetic
ccgttttttttttttacctgcac

SEQ ID NO: 16503 - DNA, 23 bp, Artificial Sequence
  Synthetic
ccgttttttttttttagtgctca

SEQ ID NO: 16504 - DNA, 23 bp, Artificial Sequence
  Synthetic
ccgttttttttttttacctgcac

SEQ ID NO: 16505 - DNA, 23 bp, Artificial Sequence
  Synthetic
ccgttttttttttttgccgctgt

SEQ ID NO: 16506 - DNA, 23 bp, Artificial Sequence
  Synthetic
ccgttttttttttttgccatgac

SEQ ID NO: 16507 - DNA, 23 bp, Artificial Sequence
  Synthetic
ccgttttttttttttgcctgtct

SEQ ID NO: 16508 - DNA, 23 bp, Artificial Sequence
  Synthetic
ccgttttttttttttgctgtcat

SEQ ID NO: 16509 - DNA, 23 bp, Artificial Sequence
  Synthetic
ccgttttttttttttacagttgc

SEQ ID NO: 16510 - DNA, 23 bp, Artificial Sequence
  Synthetic
ccgttttttttttttccaatcag

SEQ ID NO: 16511 - DNA, 23 bp, Artificial Sequence
  Synthetic
ccgttttttttttttcatggtta

SEQ ID NO: 16512 - DNA, 23 bp, Artificial Sequence
  Synthetic
ccgttttttttttttgaattgcg

SEQ ID NO: 16513 - DNA, 23 bp, Artificial Sequence
  Synthetic
ccgttttttttttttcagttctt

SEQ ID NO: 16514 - DNA, 23 bp, Artificial Sequence
  Synthetic
ccgttttttttttttaagcttgc

SEQ ID NO: 16515 - DNA, 23 bp, Artificial Sequence
  Synthetic
ccgttttttttttttaaacccag

SEQ ID NO: 16516 - DNA, 23 bp, Artificial Sequence
  Synthetic
ccgttttttttttttagacccag

SEQ ID NO: 16517 - DNA, 23 bp, Artificial Sequence
  Synthetic
ccgttttttttttttgggtattt

SEQ ID NO: 16518 - DNA, 23 bp, Artificial Sequence
  Synthetic
ccgttttttttttttgaaatccc

SEQ ID NO: 16519 - DNA, 23 bp, Artificial Sequence
  Synthetic
ccgttttttttttttgtaatccc

SEQ ID NO: 16520 - DNA, 23 bp, Artificial Sequence
  Synthetic
ccgttttttttttttgttcctgc

SEQ ID NO: 16521 - DNA, 23 bp, Artificial Sequence
  Synthetic
ccgttttttttttttgtcctgct

SEQ ID NO: 16522 - DNA, 23 bp, Artificial Sequence
  Synthetic
ccgttttttttttttagaccgag

SEQ ID NO: 16523 - DNA, 23 bp, Artificial Sequence
  Synthetic
ccgttttttttttttcctatcct

SEQ ID NO: 16524 - DNA, 23 bp, Artificial Sequence
  Synthetic
ccgttttttttttttcggaactt

SEQ ID NO: 16525 - DNA, 23 bp, Artificial Sequence
  Synthetic
ccgttttttttttttcagaactt

SEQ ID NO: 16526 - DNA, 23 bp, Artificial Sequence
  Synthetic
ccgttttttttttttggaactta

SEQ ID NO: 16527 - DNA, 23 bp, Artificial Sequence
  Synthetic
ccgttttttttttttaccgattt

SEQ ID NO: 16528 - DNA, 23 bp, Artificial Sequence
  Synthetic
ccgttttttttttttacactgat

SEQ ID NO: 16529 - DNA, 23 bp, Artificial Sequence
  Synthetic
ccgttttttttttttccgatttc

SEQ ID NO: 16530 - DNA, 23 bp, Artificial Sequence
  Synthetic
ccgttttttttttttaacaccaa

SEQ ID NO: 16531 - DNA, 23 bp, Artificial Sequence
  Synthetic
ccgttttttttttttacactgat

SEQ ID NO: 16532 - DNA, 23 bp, Artificial Sequence
  Synthetic
ccgttttttttttttctttgaca

SEQ ID NO: 16533 - DNA, 23 bp, Artificial Sequence
  Synthetic
ccgttttttttttttcactaaaa

SEQ ID NO: 16534 - DNA, 23 bp, Artificial Sequence
  Synthetic
ccgttttttttttttctgcaaac

SEQ ID NO: 16535 - DNA, 23 bp, Artificial Sequence
  Synthetic
ccgttttttttttttccagtcga

SEQ ID NO: 16536 - DNA, 23 bp, Artificial Sequence
  Synthetic
ccgttttttttttttgctgagtg

SEQ ID NO: 16537 - DNA, 23 bp, Artificial Sequence
  Synthetic
ccgttttttttttttctgagagt

SEQ ID NO: 16538 - DNA, 23 bp, Artificial Sequence
  Synthetic
ccgttttttttttttccagtcgg

SEQ ID NO: 16539 - DNA, 23 bp, Artificial Sequence
  Synthetic
ccgttttttttttttcagtcaag

SEQ ID NO: 16540 - DNA, 23 bp, Artificial Sequence
  Synthetic
ccgttttttttttttagctatgc

SEQ ID NO: 16541 - DNA, 23 bp, Artificial Sequence
  Synthetic
ccgttttttttttttaacaaaat

SEQ ID NO: 16542 - DNA, 23 bp, Artificial Sequence
  Synthetic
ccgttttttttttttaatgcaac

SEQ ID NO: 16543 - DNA, 23 bp, Artificial Sequence
  Synthetic
ccgttttttttttttaatgcaac

SEQ ID NO: 16544 - DNA, 23 bp, Artificial Sequence
  Synthetic
ccgttttttttttttacaaccag

SEQ ID NO: 16545 - DNA, 23 bp, Artificial Sequence
  Synthetic
ccgttttttttttttaatcagct

SEQ ID NO: 16546 - DNA, 23 bp, Artificial Sequence
  Synthetic
ccgttttttttttttcagatgga

SEQ ID NO: 16547 - DNA, 23 bp, Artificial Sequence
  Synthetic
ccgttttttttttttaattgcat

SEQ ID NO: 16548 - DNA, 23 bp, Artificial Sequence
  Synthetic
ccgttttttttttttaaggattt

SEQ ID NO: 16549 - DNA, 23 bp, Artificial Sequence
  Synthetic
ccgttttttttttttaccattgc

SEQ ID NO: 16550 - DNA, 23 bp, Artificial Sequence
  Synthetic
ccgttttttttttttgccacaat

SEQ ID NO: 16551 - DNA, 23 bp, Artificial Sequence
  Synthetic
ccgttttttttttttaacgggag

SEQ ID NO: 16552 - DNA, 23 bp, Artificial Sequence
  Synthetic
ccgttttttttttttaaccgaac

SEQ ID NO: 16553 - DNA, 23 bp, Artificial Sequence
  Synthetic
ccgttttttttttttcggcatta

SEQ ID NO: 16554 - DNA, 23 bp, Artificial Sequence
  Synthetic
ccgttttttttttttccagctaa

SEQ ID NO: 16555 - DNA, 23 bp, Artificial Sequence
  Synthetic
ccgttttttttttttactcagta

SEQ ID NO: 16556 - DNA, 23 bp, Artificial Sequence
  Synthetic
ccgttttttttttttgatgtagt

SEQ ID NO: 16557 - DNA, 23 bp, Artificial Sequence
  Synthetic
ccgttttttttttttcagccgta

SEQ ID NO: 16558 - DNA, 23 bp, Artificial Sequence
  Synthetic
ccgttttttttttttaaacatca

SEQ ID NO: 16559 - DNA, 23 bp, Artificial Sequence
  Synthetic
ccgttttttttttttaacaaaat

SEQ ID NO: 16560 - DNA, 23 bp, Artificial Sequence
  Synthetic
ccgttttttttttttatacagct

SEQ ID NO: 16561 - DNA, 23 bp, Artificial Sequence
  Synthetic
ccgttttttttttttctttcggt

SEQ ID NO: 16562 - DNA, 23 bp, Artificial Sequence
  Synthetic
ccgttttttttttttaggccggg

SEQ ID NO: 16563 - DNA, 23 bp, Artificial Sequence
  Synthetic
ccgttttttttttttaggccggg

SEQ ID NO: 16564 - DNA, 23 bp, Artificial Sequence
  Synthetic
ccgttttttttttttacctgcac

SEQ ID NO: 16565 - DNA, 23 bp, Artificial Sequence
  Synthetic
ccgttttttttttttacctgcac

SEQ ID NO: 16566 - DNA, 23 bp, Artificial Sequence
  Synthetic
ccgttttttttttttgcaaaaat

SEQ ID NO: 16567 - DNA, 23 bp, Artificial Sequence
  Synthetic
ccgttttttttttttacaataca

SEQ ID NO: 16568 - DNA, 23 bp, Artificial Sequence
  Synthetic
ccgttttttttttttacaagatc

SEQ ID NO: 16569 - DNA, 23 bp, Artificial Sequence
  Synthetic
ccgttttttttttttatacagct

SEQ ID NO: 16570 - DNA, 23 bp, Artificial Sequence
  Synthetic
ccgttttttttttttctttcggt

SEQ ID NO: 16571 - DNA, 23 bp, Artificial Sequence
  Synthetic
ccgttttttttttttatacagct

SEQ ID NO: 16572 - DNA, 23 bp, Artificial Sequence
  Synthetic
ccgttttttttttttcgttcggt

SEQ ID NO: 16573 - DNA, 23 bp, Artificial Sequence
  Synthetic
ccgttttttttttttgctcactc

SEQ ID NO: 16574 - DNA, 23 bp, Artificial Sequence
  Synthetic
ccgttttttttttttgctcactc

SEQ ID NO: 16575 - DNA, 23 bp, Artificial Sequence
  Synthetic
ccgttttttttttttgctcactc

SEQ ID NO: 16576 - DNA, 23 bp, Artificial Sequence
  Synthetic
ccgttttttttttttgctcactc

SEQ ID NO: 16577 - DNA, 23 bp, Artificial Sequence
  Synthetic
ccgttttttttttttgctcactc

SEQ ID NO: 16578 - DNA, 23 bp, Artificial Sequence
  Synthetic
ccgttttttttttttgctcactc

SEQ ID NO: 16579 - DNA, 23 bp, Artificial Sequence
  Synthetic
ccgttttttttttttgctcactc

SEQ ID NO: 16580 - DNA, 23 bp, Artificial Sequence
  Synthetic
ccgttttttttttttgctcactc

SEQ ID NO: 16581 - DNA, 23 bp, Artificial Sequence
  Synthetic
ccgttttttttttttgctcactc

SEQ ID NO: 16582 - DNA, 23 bp, Artificial Sequence
  Synthetic
ccgttttttttttttgctctctc

SEQ ID NO: 16583 - DNA, 23 bp, Artificial Sequence
  Synthetic
ccgttttttttttttgctcgctc

SEQ ID NO: 16584 - DNA, 23 bp, Artificial Sequence
  Synthetic
ccgttttttttttttagagctcc

SEQ ID NO: 16585 - DNA, 23 bp, Artificial Sequence
  Synthetic
ccgttttttttttttagagctcc

SEQ ID NO: 16586 - DNA, 23 bp, Artificial Sequence
  Synthetic
ccgttttttttttttggagctcc

SEQ ID NO: 16587 - DNA, 23 bp, Artificial Sequence
  Synthetic
ccgttttttttttttggagctcc

SEQ ID NO: 16588 - DNA, 23 bp, Artificial Sequence
  Synthetic
ccgttttttttttttgcatacag

SEQ ID NO: 16589 - DNA, 23 bp, Artificial Sequence
  Synthetic
ccgttttttttttttgcatacag

SEQ ID NO: 16590 - DNA, 23 bp, Artificial Sequence
  Synthetic
ccgttttttttttttgcatacag

SEQ ID NO: 16591 - DNA, 23 bp, Artificial Sequence
  Synthetic
ccgttttttttttttgcatacag

SEQ ID NO: 16592 - DNA, 23 bp, Artificial Sequence
  Synthetic
ccgttttttttttttgcatacag

SEQ ID NO: 16593 - DNA, 23 bp, Artificial Sequence
  Synthetic
ccgttttttttttttggcataca

SEQ ID NO: 16594 - DNA, 23 bp, Artificial Sequence
  Synthetic
ccgttttttttttttgatgcaga

SEQ ID NO: 16595 - DNA, 23 bp, Artificial Sequence
  Synthetic
ccgttttttttttttcacgtgcc

SEQ ID NO: 16596 - DNA, 23 bp, Artificial Sequence
  Synthetic
ccgttttttttttttcacgtgcc

SEQ ID NO: 16597 - DNA, 23 bp, Artificial Sequence
  Synthetic
ccgttttttttttttcacgtgcc

SEQ ID NO: 16598 - DNA, 23 bp, Artificial Sequence
  Synthetic
ccgttttttttttttcacgtgcc

SEQ ID NO: 16599 - DNA, 23 bp, Artificial Sequence
  Synthetic
ccgttttttttttttgggaatga

SEQ ID NO: 16600 - DNA, 23 bp, Artificial Sequence
  Synthetic
ccgttttttttttttggaatgaa

SEQ ID NO: 16601 - DNA, 23 bp, Artificial Sequence
  Synthetic
ccgttttttttttttggaatgaa

SEQ ID NO: 16602 - DNA, 23 bp, Artificial Sequence
  Synthetic
ccgttttttttttttggaatgaa

SEQ ID NO: 16603 - DNA, 23 bp, Artificial Sequence
  Synthetic
ccgttttttttttttggaatgaa

SEQ ID NO: 16604 - DNA, 23 bp, Artificial Sequence
  Synthetic
ccgttttttttttttggaatgaa

SEQ ID NO: 16605 - DNA, 23 bp, Artificial Sequence
  Synthetic
ccgttttttttttttggaatgaa

SEQ ID NO: 16606 - DNA, 23 bp, Artificial Sequence
  Synthetic
ccgttttttttttttggaatgaa

SEQ ID NO: 16607 - DNA, 23 bp, Artificial Sequence
  Synthetic
ccgttttttttttttggaatgaa

SEQ ID NO: 16608 - DNA, 23 bp, Artificial Sequence
  Synthetic
ccgttttttttttttgggattga

SEQ ID NO: 16609 - DNA, 23 bp, Artificial Sequence
  Synthetic
ccgttttttttttttgggattga

SEQ ID NO: 16610 - DNA, 23 bp, Artificial Sequence
  Synthetic
ccgttttttttttttaggaatga

SEQ ID NO: 16611 - DNA, 23 bp, Artificial Sequence
  Synthetic
ccgttttttttttttaggaatga

SEQ ID NO: 16612 - DNA, 23 bp, Artificial Sequence
  Synthetic
ccgttttttttttttgatcatgc

SEQ ID NO: 16613 - DNA, 23 bp, Artificial Sequence
  Synthetic
ccgttttttttttttgatcatgc

SEQ ID NO: 16614 - DNA, 23 bp, Artificial Sequence
  Synthetic
ccgttttttttttttgatcatgc

SEQ ID NO: 16615 - DNA, 23 bp, Artificial Sequence
  Synthetic
ccgttttttttttttgatcatgc

SEQ ID NO: 16616 - DNA, 23 bp, Artificial Sequence
  Synthetic
ccgttttttttttttagatcatg

SEQ ID NO: 16617 - DNA, 23 bp, Artificial Sequence
  Synthetic
ccgttttttttttttagatcatg

SEQ ID NO: 16618 - DNA, 23 bp, Artificial Sequence
  Synthetic
ccgttttttttttttagatcatg

SEQ ID NO: 16619 - DNA, 23 bp, Artificial Sequence
  Synthetic
ccgttttttttttttagatcatg

SEQ ID NO: 16620 - DNA, 23 bp, Artificial Sequence
  Synthetic
ccgttttttttttttagatcatg

SEQ ID NO: 16621 - DNA, 23 bp, Artificial Sequence
  Synthetic
ccgttttttttttttcccgatct

SEQ ID NO: 16622 - DNA, 23 bp, Artificial Sequence
  Synthetic
ccgttttttttttttcccgatct

SEQ ID NO: 16623 - DNA, 23 bp, Artificial Sequence
  Synthetic
ccgttttttttttttggcaagtc

SEQ ID NO: 16624 - DNA, 23 bp, Artificial Sequence
  Synthetic
ccgttttttttttttggcaagtc

SEQ ID NO: 16625 - DNA, 23 bp, Artificial Sequence
  Synthetic
ccgttttttttttttcggcaagt

SEQ ID NO: 16626 - DNA, 23 bp, Artificial Sequence
  Synthetic
ccgttttttttttttataggcag

SEQ ID NO: 16627 - DNA, 23 bp, Artificial Sequence
  Synthetic
ccgttttttttttttgtaggcag

SEQ ID NO: 16628 - DNA, 23 bp, Artificial Sequence
  Synthetic
ccgttttttttttttggcaagtc

SEQ ID NO: 16629 - DNA, 23 bp, Artificial Sequence
  Synthetic
ccgttttttttttttggcaagtc

SEQ ID NO: 16630 - DNA, 23 bp, Artificial Sequence
  Synthetic
ccgttttttttttttggcaagtc

SEQ ID NO: 16631 - DNA, 23 bp, Artificial Sequence
  Synthetic
ccgttttttttttttaggcaagt

SEQ ID NO: 16632 - DNA, 23 bp, Artificial Sequence
  Synthetic
ccgttttttttttttaggcaagt

SEQ ID NO: 16633 - DNA, 23 bp, Artificial Sequence
  Synthetic
ccgttttttttttttaggcaagt

SEQ ID NO: 16634 - DNA, 23 bp, Artificial Sequence
  Synthetic
ccgttttttttttttattggcgc

SEQ ID NO: 16635 - DNA, 23 bp, Artificial Sequence
  Synthetic
ccgttttttttttttgatattgg

SEQ ID NO: 16636 - DNA, 23 bp, Artificial Sequence
  Synthetic
ccgttttttttttttatattggc

SEQ ID NO: 16637 - DNA, 23 bp, Artificial Sequence
  Synthetic
ccgttttttttttttatattggc

SEQ ID NO: 16638 - DNA, 23 bp, Artificial Sequence
  Synthetic
ccgttttttttttttatattggc

SEQ ID NO: 16639 - DNA, 23 bp, Artificial Sequence
  Synthetic
ccgttttttttttttgatattgg

SEQ ID NO: 16640 - DNA, 23 bp, Artificial Sequence
  Synthetic
ccgttttttttttttatattggc

SEQ ID NO: 16641 - DNA, 23 bp, Artificial Sequence
  Synthetic
ccgttttttttttttgtgatatt

SEQ ID NO: 16642 - DNA, 23 bp, Artificial Sequence
  Synthetic
ccgttttttttttttatattggc

SEQ ID NO: 16643 - DNA, 23 bp, Artificial Sequence
  Synthetic
ccgttttttttttttatattggc

SEQ ID NO: 16644 - DNA, 23 bp, Artificial Sequence
  Synthetic
ccgttttttttttttgtgatatt

SEQ ID NO: 16645 - DNA, 23 bp, Artificial Sequence
  Synthetic
ccgttttttttttttcagcatca

SEQ ID NO: 16646 - DNA, 23 bp, Artificial Sequence
  Synthetic
ccgttttttttttttcagcatca

SEQ ID NO: 16647 - DNA, 23 bp, Artificial Sequence
  Synthetic
ccgttttttttttttcagcatca

SEQ ID NO: 16648 - DNA, 23 bp, Artificial Sequence
  Synthetic
ccgttttttttttttcagcatca

SEQ ID NO: 16649 - DNA, 23 bp, Artificial Sequence
  Synthetic
ccgttttttttttttgcagcatc

SEQ ID NO: 16650 - DNA, 23 bp, Artificial Sequence
  Synthetic
ccgttttttttttttggagcacc

SEQ ID NO: 16651 - DNA, 23 bp, Artificial Sequence
  Synthetic
ccgttttttttttttggagcacc

SEQ ID NO: 16652 - DNA, 23 bp, Artificial Sequence
  Synthetic
ccgttttttttttttggagcacc

SEQ ID NO: 16653 - DNA, 23 bp, Artificial Sequence
  Synthetic
ccgttttttttttttggagcacc

SEQ ID NO: 16654 - DNA, 23 bp, Artificial Sequence
  Synthetic
ccgttttttttttttgatcaatg

SEQ ID NO: 16655 - DNA, 23 bp, Artificial Sequence
  Synthetic
ccgttttttttttttgaggtgga

SEQ ID NO: 16656 - DNA, 23 bp, Artificial Sequence
  Synthetic
ccgttttttttttttgaggtgga

SEQ ID NO: 16657 - DNA, 23 bp, Artificial Sequence
  Synthetic
ccgttttttttttttagttcccc

SEQ ID NO: 16658 - DNA, 23 bp, Artificial Sequence
  Synthetic
ccgttttttttttttagttcccc

SEQ ID NO: 16659 - DNA, 23 bp, Artificial Sequence
  Synthetic
ccgttttttttttttagttcctc

SEQ ID NO: 16660 - DNA, 23 bp, Artificial Sequence
  Synthetic
ccgttttttttttttagttcaag

SEQ ID NO: 16661 - DNA, 23 bp, Artificial Sequence
  Synthetic
ccgttttttttttttagttcaag

SEQ ID NO: 16662 - DNA, 23 bp, Artificial Sequence
  Synthetic
ccgttttttttttttagggcaat

SEQ ID NO: 16663 - DNA, 23 bp, Artificial Sequence
  Synthetic
ccgttttttttttttaggacagc

SEQ ID NO: 16664 - DNA, 23 bp, Artificial Sequence
  Synthetic
ccgttttttttttttagggcaat

SEQ ID NO: 16665 - DNA, 23 bp, Artificial Sequence
  Synthetic
ccgttttttttttttagggcagc

SEQ ID NO: 16666 - DNA, 23 bp, Artificial Sequence
  Synthetic
ccgttttttttttttagggcaac

SEQ ID NO: 16667 - DNA, 23 bp, Artificial Sequence
  Synthetic
ccgttttttttttttggggcaaa

SEQ ID NO: 16668 - DNA, 23 bp, Artificial Sequence
  Synthetic
ccgttttttttttttccagggaa

SEQ ID NO: 16669 - DNA, 23 bp, Artificial Sequence
  Synthetic
ccgttttttttttttcagctttc

SEQ ID NO: 16670 - DNA, 23 bp, Artificial Sequence
  Synthetic
ccgttttttttttttatacaacc

SEQ ID NO: 16671 - DNA, 23 bp, Artificial Sequence
  Synthetic
ccgttttttttttttcatacttc

SEQ ID NO: 16672 - DNA, 23 bp, Artificial Sequence
  Synthetic
ccgttttttttttttaaattcgg

SEQ ID NO: 16673 - DNA, 23 bp, Artificial Sequence
  Synthetic
ccgttttttttttttcaagttcg

SEQ ID NO: 16674 - DNA, 23 bp, Artificial Sequence
  Synthetic
ccgttttttttttttgcattcac

SEQ ID NO: 16675 - DNA, 23 bp, Artificial Sequence
  Synthetic
ccgttttttttttttcaagttag

SEQ ID NO: 16676 - DNA, 23 bp, Artificial Sequence
  Synthetic
ccgttttttttttttagctggtt

SEQ ID NO: 16677 - DNA, 23 bp, Artificial Sequence
  Synthetic
ccgttttttttttttcgtcaaaa

SEQ ID NO: 16678 - DNA, 23 bp, Artificial Sequence
  Synthetic
ccgttttttttttttgagagaga

SEQ ID NO: 16679 - DNA, 23 bp, Artificial Sequence
  Synthetic
ccgttttttttttttcttatcag

SEQ ID NO: 16680 - DNA, 23 bp, Artificial Sequence
  Synthetic
ccgttttttttttttacagccag

SEQ ID NO: 16681 - DNA, 23 bp, Artificial Sequence
  Synthetic
ccgttttttttttttccgttgtc

SEQ ID NO: 16682 - DNA, 23 bp, Artificial Sequence
  Synthetic
ccgttttttttttttagaattgc

SEQ ID NO: 16683 - DNA, 23 bp, Artificial Sequence
  Synthetic
ccgttttttttttttaattcttc

SEQ ID NO: 16684 - DNA, 23 bp, Artificial Sequence
  Synthetic
ccgttttttttttttcgcgctac

SEQ ID NO: 16685 - DNA, 23 bp, Artificial Sequence
  Synthetic
ccgttttttttttttaggaactc

SEQ ID NO: 16686 - DNA, 23 bp, Artificial Sequence
  Synthetic
ccgttttttttttttgtaccaga

SEQ ID NO: 16687 - DNA, 23 bp, Artificial Sequence
  Synthetic
ccgttttttttttttacggacga

SEQ ID NO: 16688 - DNA, 23 bp, Artificial Sequence
  Synthetic
ccgttttttttttttgagtgtgg

SEQ ID NO: 16689 - DNA, 23 bp, Artificial Sequence
  Synthetic
ccgttttttttttttaagagagc

SEQ ID NO: 16690 - DNA, 23 bp, Artificial Sequence
  Synthetic
ccgttttttttttttagacaaag

SEQ ID NO: 16691 - DNA, 23 bp, Artificial Sequence
  Synthetic
ccgttttttttttttaattacca

SEQ ID NO: 16692 - DNA, 23 bp, Artificial Sequence
  Synthetic
ccgttttttttttttgagcacct

SEQ ID NO: 16693 - DNA, 23 bp, Artificial Sequence
  Synthetic
ccgttttttttttttactcaagg

SEQ ID NO: 16694 - DNA, 23 bp, Artificial Sequence
  Synthetic
ccgttttttttttttacagtata

SEQ ID NO: 16695 - DNA, 23 bp, Artificial Sequence
  Synthetic
ccgttttttttttttctgagcaa

SEQ ID NO: 16696 - DNA, 23 bp, Artificial Sequence
  Synthetic
ccgttttttttttttgagatacc

SEQ ID NO: 16697 - DNA, 23 bp, Artificial Sequence
  Synthetic
ccgttttttttttttaacaaaat

SEQ ID NO: 16698 - DNA, 23 bp, Artificial Sequence
  Synthetic
ccgttttttttttttctttggta

SEQ ID NO: 16699 - DNA, 23 bp, Artificial Sequence
  Synthetic
ccgttttttttttttcatcttta

SEQ ID NO: 16700 - DNA, 23 bp, Artificial Sequence
  Synthetic
ccgttttttttttttggccggga

SEQ ID NO: 16701 - DNA, 23 bp, Artificial Sequence
  Synthetic
ccgttttttttttttaggccggg

SEQ ID NO: 16702 - DNA, 23 bp, Artificial Sequence
  Synthetic
ccgttttttttttttacagctag

SEQ ID NO: 16703 - DNA, 23 bp, Artificial Sequence
  Synthetic
ccgttttttttttttacagctaa

SEQ ID NO: 16704 - DNA, 23 bp, Artificial Sequence
  Synthetic
ccgttttttttttttcagctaga

SEQ ID NO: 16705 - DNA, 23 bp, Artificial Sequence
  Synthetic
ccgttttttttttttggatacat

SEQ ID NO: 16706 - DNA, 23 bp, Artificial Sequence
  Synthetic
ccgttttttttttttcaagttcg

SEQ ID NO: 16707 - DNA, 23 bp, Artificial Sequence
  Synthetic
ccgttttttttttttagttatca

SEQ ID NO: 16708 - DNA, 23 bp, Artificial Sequence
  Synthetic
ccgttttttttttttagccctgt

SEQ ID NO: 16709 - DNA, 23 bp, Artificial Sequence
  Synthetic
ccgttttttttttttacctgcac

SEQ ID NO: 16710 - DNA, 23 bp, Artificial Sequence
  Synthetic
ccgttttttttttttgcactgtc

SEQ ID NO: 16711 - DNA, 23 bp, Artificial Sequence
  Synthetic
ccgttttttttttttcaaattcg

SEQ ID NO: 16712 - DNA, 23 bp, Artificial Sequence
  Synthetic
ccgttttttttttttcattcacc

SEQ ID NO: 16713 - DNA, 23 bp, Artificial Sequence
  Synthetic
ccgttttttttttttcaagttag

SEQ ID NO: 16714 - DNA, 23 bp, Artificial Sequence
  Synthetic
ccgttttttttttttccaagctc

SEQ ID NO: 16715 - DNA, 23 bp, Artificial Sequence
  Synthetic
ccgttttttttttttaagagacc

SEQ ID NO: 16716 - DNA, 23 bp, Artificial Sequence
  Synthetic
ccgttttttttttttagctggtt

SEQ ID NO: 16717 - DNA, 23 bp, Artificial Sequence
  Synthetic
ccgttttttttttttcataggaa

SEQ ID NO: 16718 - DNA, 23 bp, Artificial Sequence
  Synthetic
ccgttttttttttttcaaaccat

SEQ ID NO: 16719 - DNA, 23 bp, Artificial Sequence
  Synthetic
ccgttttttttttttaaccatga

SEQ ID NO: 16720 - DNA, 23 bp, Artificial Sequence
  Synthetic
ccgttttttttttttccaatatt

SEQ ID NO: 16721 - DNA, 23 bp, Artificial Sequence
  Synthetic
ccgttttttttttttaagtgcct

SEQ ID NO: 16722 - DNA, 23 bp, Artificial Sequence
  Synthetic
ccgttttttttttttacctgcac

SEQ ID NO: 16723 - DNA, 23 bp, Artificial Sequence
  Synthetic
ccgttttttttttttgcactaga

SEQ ID NO: 16724 - DNA, 23 bp, Artificial Sequence
  Synthetic
ccgttttttttttttacatggag

SEQ ID NO: 16725 - DNA, 23 bp, Artificial Sequence
  Synthetic
ccgttttttttttttcaacaaca

SEQ ID NO: 16726 - DNA, 23 bp, Artificial Sequence
  Synthetic
ccgttttttttttttgggtggag

SEQ ID NO: 16727 - DNA, 23 bp, Artificial Sequence
  Synthetic
ccgttttttttttttagctcccc

SEQ ID NO: 16728 - DNA, 23 bp, Artificial Sequence
  Synthetic
ccgttttttttttttgttttgca

SEQ ID NO: 16729 - DNA, 23 bp, Artificial Sequence
  Synthetic
ccgttttttttttttgttttgca

SEQ ID NO: 16730 - DNA, 23 bp, Artificial Sequence
  Synthetic
ccgttttttttttttctgcacta

SEQ ID NO: 16731 - DNA, 23 bp, Artificial Sequence
  Synthetic
ccgttttttttttttgactccgg

SEQ ID NO: 16732 - DNA, 23 bp, Artificial Sequence
  Synthetic
ccgttttttttttttacatcagt

SEQ ID NO: 16733 - DNA, 23 bp, Artificial Sequence
  Synthetic
ccgttttttttttttcctgtctg

SEQ ID NO: 16734 - DNA, 23 bp, Artificial Sequence
  Synthetic
ccgttttttttttttatggttag

SEQ ID NO: 16735 - DNA, 23 bp, Artificial Sequence
  Synthetic
ccgttttttttttttagttcttc

SEQ ID NO: 16736 - DNA, 23 bp, Artificial Sequence
  Synthetic
ccgttttttttttttgacccagt

SEQ ID NO: 16737 - DNA, 23 bp, Artificial Sequence
  Synthetic
ccgttttttttttttaaatccct

SEQ ID NO: 16738 - DNA, 23 bp, Artificial Sequence
  Synthetic
ccgttttttttttttcggaactt

SEQ ID NO: 16739 - DNA, 23 bp, Artificial Sequence
  Synthetic
ccgttttttttttttaatagact

SEQ ID NO: 16740 - DNA, 23 bp, Artificial Sequence
  Synthetic
ccgttttttttttttccgatttc

SEQ ID NO: 16741 - DNA, 23 bp, Artificial Sequence
  Synthetic
ccgttttttttttttgatttcaa

SEQ ID NO: 16742 - DNA, 23 bp, Artificial Sequence
  Synthetic
ccgttttttttttttgagtgtag

SEQ ID NO: 16743 - DNA, 23 bp, Artificial Sequence
  Synthetic
ccgttttttttttttaaccagct

SEQ ID NO: 16744 - DNA, 23 bp, Artificial Sequence
  Synthetic
ccgttttttttttttacagctag

SEQ ID NO: 16745 - DNA, 23 bp, Artificial Sequence
  Synthetic
ccgttttttttttttaggccggg

SEQ ID NO: 16746 - DNA, 23 bp, Artificial Sequence
  Synthetic
ccgttttttttttttcctgcacg

SEQ ID NO: 16747 - DNA, 23 bp, Artificial Sequence
  Synthetic
ccgttttttttttttcaatacaa

SEQ ID NO: 16748 - DNA, 23 bp, Artificial Sequence
  Synthetic
ccgttttttttttttcagctttc

SEQ ID NO: 16749 - DNA, 23 bp, Artificial Sequence
  Synthetic
ccgttttttttttttcatacttc

SEQ ID NO: 16750 - DNA, 23 bp, Artificial Sequence
  Synthetic
ccgttttttttttttcagtacct

SEQ ID NO: 16751 - DNA, 23 bp, Artificial Sequence
  Synthetic
ccgttttttttttttgcattcac

SEQ ID NO: 16752 - DNA, 23 bp, Artificial Sequence
  Synthetic
ccgttttttttttttcaagttag

SEQ ID NO: 16753 - DNA, 23 bp, Artificial Sequence
  Synthetic
ccgttttttttttttagctggtt

SEQ ID NO: 16754 - DNA, 23 bp, Artificial Sequence
  Synthetic
ccgttttttttttttccttatca

SEQ ID NO: 16755 - DNA, 23 bp, Artificial Sequence
  Synthetic
ccgttttttttttttcatcaaag

SEQ ID NO: 16756 - DNA, 23 bp, Artificial Sequence
  Synthetic
ccgttttttttttttccgctgtc

SEQ ID NO: 16757 - DNA, 23 bp, Artificial Sequence
  Synthetic
ccgttttttttttttagaattgc

SEQ ID NO: 16758 - DNA, 23 bp, Artificial Sequence
  Synthetic
ccgttttttttttttaattcttc

SEQ ID NO: 16759 - DNA, 23 bp, Artificial Sequence
  Synthetic
ccgttttttttttttagcacggt

SEQ ID NO: 16760 - DNA, 23 bp, Artificial Sequence
  Synthetic
ccgttttttttttttgtaccaga

SEQ ID NO: 16761 - DNA, 23 bp, Artificial Sequence
  Synthetic
ccgttttttttttttacggacga

SEQ ID NO: 16762 - DNA, 23 bp, Artificial Sequence
  Synthetic
ccgttttttttttttaaagagag

SEQ ID NO: 16763 - DNA, 23 bp, Artificial Sequence
  Synthetic
ccgttttttttttttagacaaag

SEQ ID NO: 16764 - DNA, 23 bp, Artificial Sequence
  Synthetic
ccgttttttttttttgagcacct

SEQ ID NO: 16765 - DNA, 23 bp, Artificial Sequence
  Synthetic
ccgttttttttttttctgagcaa

SEQ ID NO: 16766 - DNA, 23 bp, Artificial Sequence
  Synthetic
ccgttttttttttttgagatacc

SEQ ID NO: 16767 - DNA, 23 bp, Artificial Sequence
  Synthetic
ccgttttttttttttaacaaaat

SEQ ID NO: 16768 - DNA, 23 bp, Artificial Sequence
  Synthetic
ccgttttttttttttcatcttta

SEQ ID NO: 16769 - DNA, 23 bp, Artificial Sequence
  Synthetic
ccgttttttttttttacagctag

SEQ ID NO: 16770 - DNA, 23 bp, Artificial Sequence
  Synthetic
ccgttttttttttttaaagctag

SEQ ID NO: 16771 - DNA, 23 bp, Artificial Sequence
  Synthetic
ccgttttttttttttggatacat

SEQ ID NO: 16772 - DNA, 23 bp, Artificial Sequence
  Synthetic
ccgttttttttttttctcactct

SEQ ID NO: 16773 - DNA, 23 bp, Artificial Sequence
  Synthetic
ccgttttttttttttctcactct

SEQ ID NO: 16774 - DNA, 23 bp, Artificial Sequence
  Synthetic
ccgttttttttttttctcactct

SEQ ID NO: 16775 - DNA, 23 bp, Artificial Sequence
  Synthetic
ccgttttttttttttctcactct

SEQ ID NO: 16776 - DNA, 23 bp, Artificial Sequence
  Synthetic
ccgttttttttttttctcactct

SEQ ID NO: 16777 - DNA, 23 bp, Artificial Sequence
  Synthetic
ccgttttttttttttctcactct

SEQ ID NO: 16778 - DNA, 23 bp, Artificial Sequence
  Synthetic
ccgttttttttttttctcactct

SEQ ID NO: 16779 - DNA, 23 bp, Artificial Sequence
  Synthetic
ccgttttttttttttctctcttt

SEQ ID NO: 16780 - DNA, 23 bp, Artificial Sequence
  Synthetic
ccgttttttttttttctctctat

SEQ ID NO: 16781 - DNA, 23 bp, Artificial Sequence
  Synthetic
ccgttttttttttttctctctat

SEQ ID NO: 16782 - DNA, 23 bp, Artificial Sequence
  Synthetic
ccgttttttttttttctctctat

SEQ ID NO: 16783 - DNA, 23 bp, Artificial Sequence
  Synthetic
ccgttttttttttttctctctat

SEQ ID NO: 16784 - DNA, 23 bp, Artificial Sequence
  Synthetic
ccgttttttttttttgtctacat

SEQ ID NO: 16785 - DNA, 23 bp, Artificial Sequence
  Synthetic
ccgttttttttttttgtctacat

SEQ ID NO: 16786 - DNA, 23 bp, Artificial Sequence
  Synthetic
ccgttttttttttttagctccct

SEQ ID NO: 16787 - DNA, 23 bp, Artificial Sequence
  Synthetic
ccgttttttttttttgagctccc

SEQ ID NO: 16788 - DNA, 23 bp, Artificial Sequence
  Synthetic
ccgttttttttttttgagctccc

SEQ ID NO: 16789 - DNA, 23 bp, Artificial Sequence
  Synthetic
ccgttttttttttttcatacagg

SEQ ID NO: 16790 - DNA, 23 bp, Artificial Sequence
  Synthetic
ccgttttttttttttcatacagg

SEQ ID NO: 16791 - DNA, 23 bp, Artificial Sequence
  Synthetic
ccgttttttttttttcatacagg

SEQ ID NO: 16792 - DNA, 23 bp, Artificial Sequence
  Synthetic
ccgttttttttttttccgatgta

SEQ ID NO: 16793 - DNA, 23 bp, Artificial Sequence
  Synthetic
ccgttttttttttttgatgcaga

SEQ ID NO: 16794 - DNA, 23 bp, Artificial Sequence
  Synthetic
ccgttttttttttttgatgcaga

SEQ ID NO: 16795 - DNA, 23 bp, Artificial Sequence
  Synthetic
ccgttttttttttttgaagttcc

SEQ ID NO: 16796 - DNA, 23 bp, Artificial Sequence
  Synthetic
ccgttttttttttttacgtgccc

SEQ ID NO: 16797 - DNA, 23 bp, Artificial Sequence
  Synthetic
ccgttttttttttttacgtgccc

SEQ ID NO: 16798 - DNA, 23 bp, Artificial Sequence
  Synthetic
ccgttttttttttttcacgtgcc

SEQ ID NO: 16799 - DNA, 23 bp, Artificial Sequence
  Synthetic
ccgttttttttttttgggatgaa

SEQ ID NO: 16800 - DNA, 23 bp, Artificial Sequence
  Synthetic
ccgttttttttttttgggatgaa

SEQ ID NO: 16801 - DNA, 23 bp, Artificial Sequence
  Synthetic
ccgttttttttttttggaatgaa

SEQ ID NO: 16802 - DNA, 23 bp, Artificial Sequence
  Synthetic
ccgttttttttttttggaatgaa

SEQ ID NO: 16803 - DNA, 23 bp, Artificial Sequence
  Synthetic
ccgttttttttttttggaatgaa

SEQ ID NO: 16804 - DNA, 23 bp, Artificial Sequence
  Synthetic
ccgttttttttttttggaatgaa

SEQ ID NO: 16805 - DNA, 23 bp, Artificial Sequence
  Synthetic
ccgttttttttttttggaatgaa

SEQ ID NO: 16806 - DNA, 23 bp, Artificial Sequence
  Synthetic
ccgttttttttttttggaatgaa

SEQ ID NO: 16807 - DNA, 23 bp, Artificial Sequence
  Synthetic
ccgttttttttttttggaatgaa

SEQ ID NO: 16808 - DNA, 23 bp, Artificial Sequence
  Synthetic
ccgttttttttttttatcatgct

SEQ ID NO: 16809 - DNA, 23 bp, Artificial Sequence
  Synthetic
ccgttttttttttttatcatgct

SEQ ID NO: 16810 - DNA, 23 bp, Artificial Sequence
  Synthetic
ccgttttttttttttgatcatgc

SEQ ID NO: 16811 - DNA, 23 bp, Artificial Sequence
  Synthetic
ccgttttttttttttagatcatg

SEQ ID NO: 16812 - DNA, 23 bp, Artificial Sequence
  Synthetic
ccgttttttttttttcgacctgc

SEQ ID NO: 16813 - DNA, 23 bp, Artificial Sequence
  Synthetic
ccgttttttttttttcgacctgc

SEQ ID NO: 16814 - DNA, 23 bp, Artificial Sequence
  Synthetic
ccgttttttttttttgcaagtca

SEQ ID NO: 16815 - DNA, 23 bp, Artificial Sequence
  Synthetic
ccgttttttttttttggcaagtc

SEQ ID NO: 16816 - DNA, 23 bp, Artificial Sequence
  Synthetic
ccgttttttttttttggcaagtc

SEQ ID NO: 16817 - DNA, 23 bp, Artificial Sequence
  Synthetic
ccgttttttttttttgcaagtca

SEQ ID NO: 16818 - DNA, 23 bp, Artificial Sequence
  Synthetic
ccgttttttttttttgcaagtca

SEQ ID NO: 16819 - DNA, 23 bp, Artificial Sequence
  Synthetic
ccgttttttttttttgcaagtca

SEQ ID NO: 16820 - DNA, 23 bp, Artificial Sequence
  Synthetic
ccgttttttttttttgcaagtca

SEQ ID NO: 16821 - DNA, 23 bp, Artificial Sequence
  Synthetic
ccgttttttttttttccaaggtc

SEQ ID NO: 16822 - DNA, 23 bp, Artificial Sequence
  Synthetic
ccgttttttttttttggcaagtc

SEQ ID NO: 16823 - DNA, 23 bp, Artificial Sequence
  Synthetic
ccgttttttttttttggcaagtc

SEQ ID NO: 16824 - DNA, 23 bp, Artificial Sequence
  Synthetic
ccgttttttttttttggcaagtc

SEQ ID NO: 16825 - DNA, 23 bp, Artificial Sequence
  Synthetic
ccgttttttttttttggcaagtc

SEQ ID NO: 16826 - DNA, 23 bp, Artificial Sequence
  Synthetic
ccgttttttttttttggcaagtc

SEQ ID NO: 16827 - DNA, 23 bp, Artificial Sequence
  Synthetic
ccgttttttttttttggcaagtc

SEQ ID NO: 16828 - DNA, 23 bp, Artificial Sequence
  Synthetic
ccgttttttttttttggcaagtc

SEQ ID NO: 16829 - DNA, 23 bp, Artificial Sequence
  Synthetic
ccgttttttttttttattgacac

SEQ ID NO: 16830 - DNA, 23 bp, Artificial Sequence
  Synthetic
ccgttttttttttttattggcgc

SEQ ID NO: 16831 - DNA, 23 bp, Artificial Sequence
  Synthetic
ccgttttttttttttgatattgg

SEQ ID NO: 16832 - DNA, 23 bp, Artificial Sequence
  Synthetic
ccgttttttttttttgatattgg

SEQ ID NO: 16833 - DNA, 23 bp, Artificial Sequence
  Synthetic
ccgttttttttttttcagcatca

SEQ ID NO: 16834 - DNA, 23 bp, Artificial Sequence
  Synthetic
ccgttttttttttttcagcatca

SEQ ID NO: 16835 - DNA, 23 bp, Artificial Sequence
  Synthetic
ccgttttttttttttaatcttaa

SEQ ID NO: 16836 - DNA, 23 bp, Artificial Sequence
  Synthetic
ccgttttttttttttcagcatca

SEQ ID NO: 16837 - DNA, 23 bp, Artificial Sequence
  Synthetic
ccgttttttttttttcagcatca

SEQ ID NO: 16838 - DNA, 23 bp, Artificial Sequence
  Synthetic
ccgttttttttttttcagcatca

SEQ ID NO: 16839 - DNA, 23 bp, Artificial Sequence
  Synthetic
ccgttttttttttttatttctct

SEQ ID NO: 16840 - DNA, 23 bp, Artificial Sequence
  Synthetic
ccgttttttttttttgagctccc

SEQ ID NO: 16841 - DNA, 23 bp, Artificial Sequence
  Synthetic
ccgttttttttttttgagctccc

SEQ ID NO: 16842 - DNA, 23 bp, Artificial Sequence
  Synthetic
ccgttttttttttttgagctccc

SEQ ID NO: 16843 - DNA, 23 bp, Artificial Sequence
  Synthetic
ccgttttttttttttcgctatcc

SEQ ID NO: 16844 - DNA, 23 bp, Artificial Sequence
  Synthetic
ccgttttttttttttcgctatcc

SEQ ID NO: 16845 - DNA, 23 bp, Artificial Sequence
  Synthetic
ccgttttttttttttcgctatct

SEQ ID NO: 16846 - DNA, 23 bp, Artificial Sequence
  Synthetic
ccgttttttttttttcaatgcga

SEQ ID NO: 16847 - DNA, 23 bp, Artificial Sequence
  Synthetic
ccgttttttttttttcaatgcga

SEQ ID NO: 16848 - DNA, 23 bp, Artificial Sequence
  Synthetic
ccgttttttttttttaggtggac

SEQ ID NO: 16849 - DNA, 23 bp, Artificial Sequence
  Synthetic
ccgttttttttttttaggtggac

SEQ ID NO: 16850 - DNA, 23 bp, Artificial Sequence
  Synthetic
ccgttttttttttttgttccccc

SEQ ID NO: 16851 - DNA, 23 bp, Artificial Sequence
  Synthetic
ccgttttttttttttgtcccccc

SEQ ID NO: 16852 - DNA, 23 bp, Artificial Sequence
  Synthetic
ccgttttttttttttgtcccccc

SEQ ID NO: 16853 - DNA, 23 bp, Artificial Sequence
  Synthetic
ccgttttttttttttgttccccc

SEQ ID NO: 16854 - DNA, 23 bp, Artificial Sequence
  Synthetic
ccgttttttttttttgttccccc

SEQ ID NO: 16855 - DNA, 23 bp, Artificial Sequence
  Synthetic
ccgttttttttttttgtcccccc

SEQ ID NO: 16856 - DNA, 23 bp, Artificial Sequence
  Synthetic
ccgttttttttttttgttcaaga

SEQ ID NO: 16857 - DNA, 23 bp, Artificial Sequence
  Synthetic
ccgttttttttttttgttcaaga

SEQ ID NO: 16858 - DNA, 23 bp, Artificial Sequence
  Synthetic
ccgttttttttttttcaacgctg

SEQ ID NO: 16859 - DNA, 23 bp, Artificial Sequence
  Synthetic
ccgttttttttttttcaacgatg

SEQ ID NO: 16860 - DNA, 23 bp, Artificial Sequence
  Synthetic
ccgttttttttttttggggtgac

SEQ ID NO: 16861 - DNA, 23 bp, Artificial Sequence
  Synthetic
ccgttttttttttttggggtgac

SEQ ID NO: 16862 - DNA, 23 bp, Artificial Sequence
  Synthetic
ccgttttttttttttggggtgac

SEQ ID NO: 16863 - DNA, 23 bp, Artificial Sequence
  Synthetic
ccgttttttttttttgggcaaat

SEQ ID NO: 16864 - DNA, 23 bp, Artificial Sequence
  Synthetic
ccgttttttttttttgggcaact

SEQ ID NO: 16865 - DNA, 23 bp, Artificial Sequence
  Synthetic
ccgttttttttttttgggcaact

SEQ ID NO: 16866 - DNA, 23 bp, Artificial Sequence
  Synthetic
ccgttttttttttttgggcaaat

SEQ ID NO: 16867 - DNA, 23 bp, Artificial Sequence
  Synthetic
ccgttttttttttttaggcaaat

SEQ ID NO: 16868 - DNA, 23 bp, Artificial Sequence
  Synthetic
ccgttttttttttttgggcaaat

SEQ ID NO: 16869 - DNA, 23 bp, Artificial Sequence
  Synthetic
ccgttttttttttttacttataa

SEQ ID NO: 16870 - DNA, 23 bp, Artificial Sequence
  Synthetic
ccgttttttttttttggtcgaca

SEQ ID NO: 16871 - DNA, 23 bp, Artificial Sequence
  Synthetic
ccgttttttttttttgaggttta

SEQ ID NO: 16872 - DNA, 23 bp, Artificial Sequence
  Synthetic
ccgttttttttttttagtttgtg

SEQ ID NO: 16873 - DNA, 23 bp, Artificial Sequence
  Synthetic
ccgttttttttttttgccgcaac

SEQ ID NO: 16874 - DNA, 23 bp, Artificial Sequence
  Synthetic
ccgttttttttttttatgggtta

SEQ ID NO: 16875 - DNA, 23 bp, Artificial Sequence
  Synthetic
ccgttttttttttttatgggtta

SEQ ID NO: 16876 - DNA, 23 bp, Artificial Sequence
  Synthetic
ccgttttttttttttatgggtta

SEQ ID NO: 16877 - DNA, 23 bp, Artificial Sequence
  Synthetic
ccgttttttttttttgattacaa

SEQ ID NO: 16878 - DNA, 23 bp, Artificial Sequence
  Synthetic
ccgttttttttttttcaaaagta

SEQ ID NO: 16879 - DNA, 23 bp, Artificial Sequence
  Synthetic
ccgttttttttttttcagggaag

SEQ ID NO: 16880 - DNA, 23 bp, Artificial Sequence
  Synthetic
ccgttttttttttttcagaacaa

SEQ ID NO: 16881 - DNA, 23 bp, Artificial Sequence
  Synthetic
ccgttttttttttttcgatgatg

SEQ ID NO: 16882 - DNA, 23 bp, Artificial Sequence
  Synthetic
ccgttttttttttttctgtttct

SEQ ID NO: 16883 - DNA, 23 bp, Artificial Sequence
  Synthetic
ccgttttttttttttacagtgta

SEQ ID NO: 16884 - DNA, 23 bp, Artificial Sequence
  Synthetic
ccgttttttttttttaacaaatt

SEQ ID NO: 16885 - DNA, 23 bp, Artificial Sequence
  Synthetic
ccgttttttttttttcagttcat

SEQ ID NO: 16886 - DNA, 23 bp, Artificial Sequence
  Synthetic
ccgttttttttttttacatcctc

SEQ ID NO: 16887 - DNA, 23 bp, Artificial Sequence
  Synthetic
ccgttttttttttttatttccgt

SEQ ID NO: 16888 - DNA, 23 bp, Artificial Sequence
  Synthetic
ccgttttttttttttaaggacaa

SEQ ID NO: 16889 - DNA, 23 bp, Artificial Sequence
  Synthetic
ccgttttttttttttacaaaaca

SEQ ID NO: 16890 - DNA, 23 bp, Artificial Sequence
  Synthetic
ccgttttttttttttacaaaaca

SEQ ID NO: 16891 - DNA, 23 bp, Artificial Sequence
  Synthetic
ccgttttttttttttacaaaaga

SEQ ID NO: 16892 - DNA, 23 bp, Artificial Sequence
  Synthetic
ccgttttttttttttgggctacc

SEQ ID NO: 16893 - DNA, 23 bp, Artificial Sequence
  Synthetic
ccgttttttttttttgggcggag

SEQ ID NO: 16894 - DNA, 23 bp, Artificial Sequence
  Synthetic
ccgttttttttttttgacaaaag

SEQ ID NO: 16895 - DNA, 23 bp, Artificial Sequence
  Synthetic
ccgttttttttttttggccatat

SEQ ID NO: 16896 - DNA, 23 bp, Artificial Sequence
  Synthetic
ccgttttttttttttcactgcta

SEQ ID NO: 16897 - DNA, 23 bp, Artificial Sequence
  Synthetic
ccgttttttttttttcatcaata

SEQ ID NO: 16898 - DNA, 23 bp, Artificial Sequence
  Synthetic
ccgttttttttttttcaacgaaa

SEQ ID NO: 16899 - DNA, 23 bp, Artificial Sequence
  Synthetic
ccgttttttttttttgtgtacat

SEQ ID NO: 16900 - DNA, 23 bp, Artificial Sequence
  Synthetic
ccgttttttttttttagcagcaa

SEQ ID NO: 16901 - DNA, 23 bp, Artificial Sequence
  Synthetic
ccgttttttttttttcagatatt

SEQ ID NO: 16902 - DNA, 23 bp, Artificial Sequence
  Synthetic
ccgttttttttttttgtatccag

SEQ ID NO: 16903 - DNA, 23 bp, Artificial Sequence
  Synthetic
ccgttttttttttttgaacatcc

SEQ ID NO: 16904 - DNA, 23 bp, Artificial Sequence
  Synthetic
ccgttttttttttttacatgaac

SEQ ID NO: 16905 - DNA, 23 bp, Artificial Sequence
  Synthetic
ccgttttttttttttatacaacc

SEQ ID NO: 16906 - DNA, 23 bp, Artificial Sequence
  Synthetic
ccgttttttttttttcatacttc

SEQ ID NO: 16907 - DNA, 23 bp, Artificial Sequence
  Synthetic
ccgttttttttttttaaattcgg

SEQ ID NO: 16908 - DNA, 23 bp, Artificial Sequence
  Synthetic
ccgttttttttttttgcattcac

SEQ ID NO: 16909 - DNA, 23 bp, Artificial Sequence
  Synthetic
ccgttttttttttttgagagaga

SEQ ID NO: 16910 - DNA, 23 bp, Artificial Sequence
  Synthetic
ccgttttttttttttaattcttc

SEQ ID NO: 16911 - DNA, 23 bp, Artificial Sequence
  Synthetic
ccgttttttttttttaattctcc

SEQ ID NO: 16912 - DNA, 23 bp, Artificial Sequence
  Synthetic
ccgttttttttttttcgcgctac

SEQ ID NO: 16913 - DNA, 23 bp, Artificial Sequence
  Synthetic
ccgttttttttttttaggaactc

SEQ ID NO: 16914 - DNA, 23 bp, Artificial Sequence
  Synthetic
ccgttttttttttttgtaccaga

SEQ ID NO: 16915 - DNA, 23 bp, Artificial Sequence
  Synthetic
ccgttttttttttttagtgtgga

SEQ ID NO: 16916 - DNA, 23 bp, Artificial Sequence
  Synthetic
ccgttttttttttttagacaaag

SEQ ID NO: 16917 - DNA, 23 bp, Artificial Sequence
  Synthetic
ccgttttttttttttaattacca

SEQ ID NO: 16918 - DNA, 23 bp, Artificial Sequence
  Synthetic
ccgttttttttttttgagcacct

SEQ ID NO: 16919 - DNA, 23 bp, Artificial Sequence
  Synthetic
ccgttttttttttttactcaagg

SEQ ID NO: 16920 - DNA, 23 bp, Artificial Sequence
  Synthetic
ccgttttttttttttgctatgcc

SEQ ID NO: 16921 - DNA, 23 bp, Artificial Sequence
  Synthetic
ccgttttttttttttaccagcta

SEQ ID NO: 16922 - DNA, 23 bp, Artificial Sequence
  Synthetic
ccgttttttttttttaacaaaat

SEQ ID NO: 16923 - DNA, 23 bp, Artificial Sequence
  Synthetic
ccgttttttttttttctacccat

SEQ ID NO: 16924 - DNA, 23 bp, Artificial Sequence
  Synthetic
ccgttttttttttttcatcttta

SEQ ID NO: 16925 - DNA, 23 bp, Artificial Sequence
  Synthetic
ccgttttttttttttacagctag

SEQ ID NO: 16926 - DNA, 23 bp, Artificial Sequence
  Synthetic
ccgttttttttttttctatacaa

SEQ ID NO: 16927 - DNA, 23 bp, Artificial Sequence
  Synthetic
ccgttttttttttttctatgcaa

SEQ ID NO: 16928 - DNA, 23 bp, Artificial Sequence
  Synthetic
ccgttttttttttttctatacaa

SEQ ID NO: 16929 - DNA, 23 bp, Artificial Sequence
  Synthetic
ccgttttttttttttctgtacaa

SEQ ID NO: 16930 - DNA, 23 bp, Artificial Sequence
  Synthetic
ccgttttttttttttcagcacaa

SEQ ID NO: 16931 - DNA, 23 bp, Artificial Sequence
  Synthetic
ccgttttttttttttgttatcac

SEQ ID NO: 16932 - DNA, 23 bp, Artificial Sequence
  Synthetic
ccgttttttttttttagccctgt

SEQ ID NO: 16933 - DNA, 23 bp, Artificial Sequence
  Synthetic
ccgttttttttttttctgcactg

SEQ ID NO: 16934 - DNA, 23 bp, Artificial Sequence
  Synthetic
ccgttttttttttttagccctgt

SEQ ID NO: 16935 - DNA, 23 bp, Artificial Sequence
  Synthetic
ccgttttttttttttcaaattcg

SEQ ID NO: 16936 - DNA, 23 bp, Artificial Sequence
  Synthetic
ccgttttttttttttcaaattcg

SEQ ID NO: 16937 - DNA, 23 bp, Artificial Sequence
  Synthetic
ccgttttttttttttaacaccat

SEQ ID NO: 16938 - DNA, 23 bp, Artificial Sequence
  Synthetic
ccgttttttttttttcattcacc

SEQ ID NO: 16939 - DNA, 23 bp, Artificial Sequence
  Synthetic
ccgttttttttttttcaggttaa

SEQ ID NO: 16940 - DNA, 23 bp, Artificial Sequence
  Synthetic
ccgttttttttttttcaagttag

SEQ ID NO: 16941 - DNA, 23 bp, Artificial Sequence
  Synthetic
ccgttttttttttttcattatta

SEQ ID NO: 16942 - DNA, 23 bp, Artificial Sequence
  Synthetic
ccgttttttttttttccaagctc

SEQ ID NO: 16943 - DNA, 23 bp, Artificial Sequence
  Synthetic
ccgttttttttttttaagagacc

SEQ ID NO: 16944 - DNA, 23 bp, Artificial Sequence
  Synthetic
ccgttttttttttttaccatggc

SEQ ID NO: 16945 - DNA, 23 bp, Artificial Sequence
  Synthetic
ccgttttttttttttgcctgatt

SEQ ID NO: 16946 - DNA, 23 bp, Artificial Sequence
  Synthetic
ccgttttttttttttggagacac

SEQ ID NO: 16947 - DNA, 23 bp, Artificial Sequence
  Synthetic
ccgttttttttttttgtggttct

SEQ ID NO: 16948 - DNA, 23 bp, Artificial Sequence
  Synthetic
ccgttttttttttttgtgctttc

SEQ ID NO: 16949 - DNA, 23 bp, Artificial Sequence
  Synthetic
ccgttttttttttttccataaag

SEQ ID NO: 16950 - DNA, 23 bp, Artificial Sequence
  Synthetic
ccgttttttttttttggattcct

SEQ ID NO: 16951 - DNA, 23 bp, Artificial Sequence
  Synthetic
ccgttttttttttttaaagttct

SEQ ID NO: 16952 - DNA, 23 bp, Artificial Sequence
  Synthetic
ccgttttttttttttaaagttct

SEQ ID NO: 16953 - DNA, 23 bp, Artificial Sequence
  Synthetic
ccgttttttttttttactggtac

SEQ ID NO: 16954 - DNA, 23 bp, Artificial Sequence
  Synthetic
ccgttttttttttttcaaggagc

SEQ ID NO: 16955 - DNA, 23 bp, Artificial Sequence
  Synthetic
ccgttttttttttttagactgtg

SEQ ID NO: 16956 - DNA, 23 bp, Artificial Sequence
  Synthetic
ccgttttttttttttaaccatga

SEQ ID NO: 16957 - DNA, 23 bp, Artificial Sequence
  Synthetic
ccgttttttttttttcaatattt

SEQ ID NO: 16958 - DNA, 23 bp, Artificial Sequence
  Synthetic
ccgttttttttttttaagtgcct

SEQ ID NO: 16959 - DNA, 23 bp, Artificial Sequence
  Synthetic
ccgttttttttttttacctgcac

SEQ ID NO: 16960 - DNA, 23 bp, Artificial Sequence
  Synthetic
ccgttttttttttttctcaccga

SEQ ID NO: 16961 - DNA, 23 bp, Artificial Sequence
  Synthetic
ccgttttttttttttacccaccg

SEQ ID NO: 16962 - DNA, 23 bp, Artificial Sequence
  Synthetic
ccgttttttttttttactcaccg

SEQ ID NO: 16963 - DNA, 23 bp, Artificial Sequence
  Synthetic
ccgttttttttttttcccaaaag

SEQ ID NO: 16964 - DNA, 23 bp, Artificial Sequence
  Synthetic
ccgttttttttttttgcactaga

SEQ ID NO: 16965 - DNA, 23 bp, Artificial Sequence
  Synthetic
ccgttttttttttttctgcacta

SEQ ID NO: 16966 - DNA, 23 bp, Artificial Sequence
  Synthetic
ccgttttttttttttgctgcttt

SEQ ID NO: 16967 - DNA, 23 bp, Artificial Sequence
  Synthetic
ccgttttttttttttgctgtcaa

SEQ ID NO: 16968 - DNA, 23 bp, Artificial Sequence
  Synthetic
ccgttttttttttttgggacttt

SEQ ID NO: 16969 - DNA, 23 bp, Artificial Sequence
  Synthetic
ccgttttttttttttctcgcccg

SEQ ID NO: 16970 - DNA, 23 bp, Artificial Sequence
  Synthetic
ccgttttttttttttcaggtagt

SEQ ID NO: 16971 - DNA, 23 bp, Artificial Sequence
  Synthetic
ccgttttttttttttccaatgtg

SEQ ID NO: 16972 - DNA, 23 bp, Artificial Sequence
  Synthetic
ccgttttttttttttacagatag

SEQ ID NO: 16973 - DNA, 23 bp, Artificial Sequence
  Synthetic
ccgttttttttttttcatcgtta

SEQ ID NO: 16974 - DNA, 23 bp, Artificial Sequence
  Synthetic
ccgttttttttttttcattacca

SEQ ID NO: 16975 - DNA, 23 bp, Artificial Sequence
  Synthetic
ccgttttttttttttatcattac

SEQ ID NO: 16976 - DNA, 23 bp, Artificial Sequence
  Synthetic
ccgttttttttttttgactccgg

SEQ ID NO: 16977 - DNA, 23 bp, Artificial Sequence
  Synthetic
ccgttttttttttttcctgcact

SEQ ID NO: 16978 - DNA, 23 bp, Artificial Sequence
  Synthetic
ccgttttttttttttctgcactg

SEQ ID NO: 16979 - DNA, 23 bp, Artificial Sequence
  Synthetic
ccgttttttttttttcaacatca

SEQ ID NO: 16980 - DNA, 23 bp, Artificial Sequence
  Synthetic
ccgttttttttttttacagccca

SEQ ID NO: 16981 - DNA, 23 bp, Artificial Sequence
  Synthetic
ccgttttttttttttgccgctgt

SEQ ID NO: 16982 - DNA, 23 bp, Artificial Sequence
  Synthetic
ccgttttttttttttgcctgtct

SEQ ID NO: 16983 - DNA, 23 bp, Artificial Sequence
  Synthetic
ccgttttttttttttgtcaattc

SEQ ID NO: 16984 - DNA, 23 bp, Artificial Sequence
  Synthetic
ccgttttttttttttatggttag

SEQ ID NO: 16985 - DNA, 23 bp, Artificial Sequence
  Synthetic
ccgttttttttttttagcttgcc

SEQ ID NO: 16986 - DNA, 23 bp, Artificial Sequence
  Synthetic
ccgttttttttttttacccagca

SEQ ID NO: 16987 - DNA, 23 bp, Artificial Sequence
  Synthetic
ccgttttttttttttccagtagc

SEQ ID NO: 16988 - DNA, 23 bp, Artificial Sequence
  Synthetic
ccgttttttttttttaaatccct

SEQ ID NO: 16989 - DNA, 23 bp, Artificial Sequence
  Synthetic
ccgttttttttttttgtaatccc

SEQ ID NO: 16990 - DNA, 23 bp, Artificial Sequence
  Synthetic
ccgttttttttttttcctgctga

SEQ ID NO: 16991 - DNA, 23 bp, Artificial Sequence
  Synthetic
ccgttttttttttttgaccgaga

SEQ ID NO: 16992 - DNA, 23 bp, Artificial Sequence
  Synthetic
ccgttttttttttttcctatcct

SEQ ID NO: 16993 - DNA, 23 bp, Artificial Sequence
  Synthetic
ccgttttttttttttcctatcct

SEQ ID NO: 16994 - DNA, 23 bp, Artificial Sequence
  Synthetic
ccgttttttttttttgaacttag

SEQ ID NO: 16995 - DNA, 23 bp, Artificial Sequence
  Synthetic
ccgttttttttttttagaactta

SEQ ID NO: 16996 - DNA, 23 bp, Artificial Sequence
  Synthetic
ccgttttttttttttccgatttc

SEQ ID NO: 16997 - DNA, 23 bp, Artificial Sequence
  Synthetic
ccgttttttttttttacactgat

SEQ ID NO: 16998 - DNA, 23 bp, Artificial Sequence
  Synthetic
ccgttttttttttttccgatttc

SEQ ID NO: 16999 - DNA, 23 bp, Artificial Sequence
  Synthetic
ccgttttttttttttcttccagt

SEQ ID NO: 17000 - DNA, 23 bp, Artificial Sequence
  Synthetic
ccgttttttttttttctgagtgt

SEQ ID NO: 17001 - DNA, 23 bp, Artificial Sequence
  Synthetic
ccgttttttttttttgagagtgt

SEQ ID NO: 17002 - DNA, 23 bp, Artificial Sequence
  Synthetic
ccgttttttttttttcttccagt

SEQ ID NO: 17003 - DNA, 23 bp, Artificial Sequence
  Synthetic
ccgttttttttttttcttccagt

SEQ ID NO: 17004 - DNA, 23 bp, Artificial Sequence
  Synthetic
ccgttttttttttttctatgcca

SEQ ID NO: 17005 - DNA, 23 bp, Artificial Sequence
  Synthetic
ccgttttttttttttccctctca

SEQ ID NO: 17006 - DNA, 23 bp, Artificial Sequence
  Synthetic
ccgttttttttttttatgggtgc

SEQ ID NO: 17007 - DNA, 23 bp, Artificial Sequence
  Synthetic
ccgttttttttttttcactggac

SEQ ID NO: 17008 - DNA, 23 bp, Artificial Sequence
  Synthetic
ccgttttttttttttatcagcta

SEQ ID NO: 17009 - DNA, 23 bp, Artificial Sequence
  Synthetic
ccgttttttttttttatcagcta

SEQ ID NO: 17010 - DNA, 23 bp, Artificial Sequence
  Synthetic
ccgttttttttttttcccctgga

SEQ ID NO: 17011 - DNA, 23 bp, Artificial Sequence
  Synthetic
ccgttttttttttttcagatgga

SEQ ID NO: 17012 - DNA, 23 bp, Artificial Sequence
  Synthetic
ccgttttttttttttagatcaac

SEQ ID NO: 17013 - DNA, 23 bp, Artificial Sequence
  Synthetic
ccgttttttttttttgaatataa

SEQ ID NO: 17014 - DNA, 23 bp, Artificial Sequence
  Synthetic
ccgttttttttttttacgtggac

SEQ ID NO: 17015 - DNA, 23 bp, Artificial Sequence
  Synthetic
ccgttttttttttttgcatgttc

SEQ ID NO: 17016 - DNA, 23 bp, Artificial Sequence
  Synthetic
ccgttttttttttttgaggggcc

SEQ ID NO: 17017 - DNA, 23 bp, Artificial Sequence
  Synthetic
ccgttttttttttttgcggacac

SEQ ID NO: 17018 - DNA, 23 bp, Artificial Sequence
  Synthetic
ccgttttttttttttacgggagt

SEQ ID NO: 17019 - DNA, 23 bp, Artificial Sequence
  Synthetic
ccgttttttttttttaggaacac

SEQ ID NO: 17020 - DNA, 23 bp, Artificial Sequence
  Synthetic
ccgttttttttttttgtagtcca

SEQ ID NO: 17021 - DNA, 23 bp, Artificial Sequence
  Synthetic
ccgttttttttttttgtatatgc

SEQ ID NO: 17022 - DNA, 23 bp, Artificial Sequence
  Synthetic
ccgttttttttttttgggagggg

SEQ ID NO: 17023 - DNA, 23 bp, Artificial Sequence
  Synthetic
ccgttttttttttttggatgtcc

SEQ ID NO: 17024 - DNA, 23 bp, Artificial Sequence
  Synthetic
ccgttttttttttttgtggatga

SEQ ID NO: 17025 - DNA, 23 bp, Artificial Sequence
  Synthetic
ccgttttttttttttacatcact

SEQ ID NO: 17026 - DNA, 23 bp, Artificial Sequence
  Synthetic
ccgttttttttttttggtcctac

SEQ ID NO: 17027 - DNA, 23 bp, Artificial Sequence
  Synthetic
ccgttttttttttttccaataaa

SEQ ID NO: 17028 - DNA, 23 bp, Artificial Sequence
  Synthetic
ccgttttttttttttcacaataa

SEQ ID NO: 17029 - DNA, 23 bp, Artificial Sequence
  Synthetic
ccgttttttttttttcaacaaaa

SEQ ID NO: 17030 - DNA, 23 bp, Artificial Sequence
  Synthetic
ccgttttttttttttaggccggg

SEQ ID NO: 17031 - DNA, 23 bp, Artificial Sequence
  Synthetic
ccgttttttttttttctgcacga

SEQ ID NO: 17032 - DNA, 23 bp, Artificial Sequence
  Synthetic
ccgttttttttttttcaatacaa

SEQ ID NO: 17033 - DNA, 23 bp, Artificial Sequence
  Synthetic
ccgttttttttttttaagatcgg

SEQ ID NO: 17034 - DNA, 23 bp, Artificial Sequence
  Synthetic
ccgttttttttttttctatacaa

SEQ ID NO: 17035 - DNA, 23 bp, Artificial Sequence
  Synthetic
ccgttttttttttttcacttgag

SEQ ID NO: 17036 - DNA, 23 bp, Artificial Sequence
  Synthetic
ccgttttttttttttgaatgcgt

SEQ ID NO: 17037 - DNA, 23 bp, Artificial Sequence
  Synthetic
ccgttttttttttttatacttct

SEQ ID NO: 17038 - DNA, 23 bp, Artificial Sequence
  Synthetic
ccgttttttttttttcattcacc

SEQ ID NO: 17039 - DNA, 23 bp, Artificial Sequence
  Synthetic
ccgttttttttttttgtgaattc

SEQ ID NO: 17040 - DNA, 23 bp, Artificial Sequence
  Synthetic
ccgttttttttttttggtcgcac

SEQ ID NO: 17041 - DNA, 23 bp, Artificial Sequence
  Synthetic
ccgttttttttttttgcctgttg

SEQ ID NO: 17042 - DNA, 23 bp, Artificial Sequence
  Synthetic
ccgttttttttttttccgcagtt

SEQ ID NO: 17043 - DNA, 23 bp, Artificial Sequence
  Synthetic
ccgttttttttttttcgcacatg

SEQ ID NO: 17044 - DNA, 23 bp, Artificial Sequence
  Synthetic
ccgttttttttttttgggtattc

SEQ ID NO: 17045 - DNA, 23 bp, Artificial Sequence
  Synthetic
ccgttttttttttttcgtcatta

SEQ ID NO: 17046 - DNA, 23 bp, Artificial Sequence
  Synthetic
ccgttttttttttttagtaccta

SEQ ID NO: 17047 - DNA, 23 bp, Artificial Sequence
  Synthetic
ccgttttttttttttgtactttt

SEQ ID NO: 17048 - DNA, 23 bp, Artificial Sequence
  Synthetic
ccgttttttttttttcgaaaatt

SEQ ID NO: 17049 - DNA, 23 bp, Artificial Sequence
  Synthetic
ccgttttttttttttctcacacc

SEQ ID NO: 17050 - DNA, 23 bp, Artificial Sequence
  Synthetic
ccgttttttttttttaccacttt

SEQ ID NO: 17051 - DNA, 23 bp, Artificial Sequence
  Synthetic
ccgttttttttttttgctacttg

SEQ ID NO: 17052 - DNA, 23 bp, Artificial Sequence
  Synthetic
ccgttttttttttttctcctacc

SEQ ID NO: 17053 - DNA, 23 bp, Artificial Sequence
  Synthetic
ccgttttttttttttgcgttatc

SEQ ID NO: 17054 - DNA, 23 bp, Artificial Sequence
  Synthetic
ccgttttttttttttaacactca

SEQ ID NO: 17055 - DNA, 23 bp, Artificial Sequence
  Synthetic
ccgttttttttttttgtgccaac

SEQ ID NO: 17056 - DNA, 23 bp, Artificial Sequence
  Synthetic
ccgttttttttttttaagagcgg

SEQ ID NO: 17057 - DNA, 23 bp, Artificial Sequence
  Synthetic
ccgttttttttttttcctgcggc

SEQ ID NO: 17058 - DNA, 23 bp, Artificial Sequence
  Synthetic
ccgttttttttttttagtgttag

SEQ ID NO: 17059 - DNA, 23 bp, Artificial Sequence
  Synthetic
ccgttttttttttttcagttgca

SEQ ID NO: 17060 - DNA, 23 bp, Artificial Sequence
  Synthetic
ccgttttttttttttccagatta

SEQ ID NO: 17061 - DNA, 23 bp, Artificial Sequence
  Synthetic
ccgttttttttttttcaaaactg

SEQ ID NO: 17062 - DNA, 23 bp, Artificial Sequence
  Synthetic
ccgttttttttttttaccagcta

SEQ ID NO: 17063 - DNA, 23 bp, Artificial Sequence
  Synthetic
ccgttttttttttttcaagtttt

SEQ ID NO: 17064 - DNA, 23 bp, Artificial Sequence
  Synthetic
ccgttttttttttttaccaacac

SEQ ID NO: 17065 - DNA, 23 bp, Artificial Sequence
  Synthetic
ccgttttttttttttgagcagca

SEQ ID NO: 17066 - DNA, 23 bp, Artificial Sequence
  Synthetic
ccgttttttttttttagctcagg

SEQ ID NO: 17067 - DNA, 23 bp, Artificial Sequence
  Synthetic
ccgttttttttttttatttgttc

SEQ ID NO: 17068 - DNA, 23 bp, Artificial Sequence
  Synthetic
ccgttttttttttttgtcaatga

SEQ ID NO: 17069 - DNA, 23 bp, Artificial Sequence
  Synthetic
ccgttttttttttttacgactaa

SEQ ID NO: 17070 - DNA, 23 bp, Artificial Sequence
  Synthetic
ccgttttttttttttcgaatttt

SEQ ID NO: 17071 - DNA, 23 bp, Artificial Sequence
  Synthetic
ccgttttttttttttaacgggat

SEQ ID NO: 17072 - DNA, 23 bp, Artificial Sequence
  Synthetic
ccgttttttttttttccaggttg

SEQ ID NO: 17073 - DNA, 23 bp, Artificial Sequence
  Synthetic
ccgttttttttttttaccgtttt

SEQ ID NO: 17074 - DNA, 23 bp, Artificial Sequence
  Synthetic
ccgttttttttttttgctgattg

SEQ ID NO: 17075 - DNA, 23 bp, Artificial Sequence
  Synthetic
ccgttttttttttttgagttttt

SEQ ID NO: 17076 - DNA, 23 bp, Artificial Sequence
  Synthetic
ccgttttttttttttagatgtta

SEQ ID NO: 17077 - DNA, 23 bp, Artificial Sequence
  Synthetic
ccgttttttttttttgacagcaa

SEQ ID NO: 17078 - DNA, 23 bp, Artificial Sequence
  Synthetic
ccgttttttttttttctgaatgt

SEQ ID NO: 17079 - DNA, 23 bp, Artificial Sequence
  Synthetic
ccgttttttttttttctgaatgt

SEQ ID NO: 17080 - DNA, 23 bp, Artificial Sequence
  Synthetic
ccgttttttttttttagagagcg

SEQ ID NO: 17081 - DNA, 23 bp, Artificial Sequence
  Synthetic
ccgttttttttttttagagagcg

SEQ ID NO: 17082 - DNA, 23 bp, Artificial Sequence
  Synthetic
ccgttttttttttttcatctact

SEQ ID NO: 17083 - DNA, 23 bp, Artificial Sequence
  Synthetic
ccgttttttttttttcagcttct

SEQ ID NO: 17084 - DNA, 23 bp, Artificial Sequence
  Synthetic
ccgttttttttttttcccaagaa

SEQ ID NO: 17085 - DNA, 23 bp, Artificial Sequence
  Synthetic
ccgttttttttttttcatggcaa

SEQ ID NO: 17086 - DNA, 23 bp, Artificial Sequence
  Synthetic
ccgttttttttttttcacggaaa

SEQ ID NO: 17087 - DNA, 23 bp, Artificial Sequence
  Synthetic
ccgttttttttttttggcagaaa

SEQ ID NO: 17088 - DNA, 23 bp, Artificial Sequence
  Synthetic
ccgttttttttttttacacagct

SEQ ID NO: 17089 - DNA, 23 bp, Artificial Sequence
  Synthetic
ccgttttttttttttccgtactg

SEQ ID NO: 17090 - DNA, 23 bp, Artificial Sequence
  Synthetic
ccgttttttttttttactagaaa

SEQ ID NO: 17091 - DNA, 23 bp, Artificial Sequence
  Synthetic
ccgttttttttttttgcagagtc

SEQ ID NO: 17092 - DNA, 23 bp, Artificial Sequence
  Synthetic
ccgttttttttttttaagctaga

SEQ ID NO: 17093 - DNA, 23 bp, Artificial Sequence
  Synthetic
ccgttttttttttttgtacacgc

SEQ ID NO: 17094 - DNA, 23 bp, Artificial Sequence
  Synthetic
ccgttttttttttttctctttct

SEQ ID NO: 17095 - DNA, 23 bp, Artificial Sequence
  Synthetic
ccgttttttttttttggaacacc

SEQ ID NO: 17096 - DNA, 23 bp, Artificial Sequence
  Synthetic
ccgttttttttttttctacccat

SEQ ID NO: 17097 - DNA, 23 bp, Artificial Sequence
  Synthetic
ccgttttttttttttatgccaac

SEQ ID NO: 17098 - DNA, 23 bp, Artificial Sequence
  Synthetic
ccgttttttttttttgaactgcc

SEQ ID NO: 17099 - DNA, 23 bp, Artificial Sequence
  Synthetic
ccgttttttttttttgactgcca

SEQ ID NO: 17100 - DNA, 23 bp, Artificial Sequence
  Synthetic
ccgttttttttttttaggcggtt

SEQ ID NO: 17101 - DNA, 23 bp, Artificial Sequence
  Synthetic
ccgttttttttttttacagctat

SEQ ID NO: 17102 - DNA, 23 bp, Artificial Sequence
  Synthetic
ccgttttttttttttctttggta

SEQ ID NO: 17103 - DNA, 23 bp, Artificial Sequence
  Synthetic
ccgttttttttttttgctttcaa

SEQ ID NO: 17104 - DNA, 23 bp, Artificial Sequence
  Synthetic
ccgttttttttttttagctttca

SEQ ID NO: 17105 - DNA, 23 bp, Artificial Sequence
  Synthetic
ccgttttttttttttggctttca

SEQ ID NO: 17106 - DNA, 23 bp, Artificial Sequence
  Synthetic
ccgttttttttttttactgaatt

SEQ ID NO: 17107 - DNA, 23 bp, Artificial Sequence
  Synthetic
ccgttttttttttttcagcattg

SEQ ID NO: 17108 - DNA, 23 bp, Artificial Sequence
  Synthetic
ccgttttttttttttacgccttt

SEQ ID NO: 17109 - DNA, 23 bp, Artificial Sequence
  Synthetic
ccgttttttttttttctgtggca

SEQ ID NO: 17110 - DNA, 23 bp, Artificial Sequence
  Synthetic
ccgttttttttttttacctgaaa

SEQ ID NO: 17111 - DNA, 23 bp, Artificial Sequence
  Synthetic
ccgttttttttttttggcattca

SEQ ID NO: 17112 - DNA, 23 bp, Artificial Sequence
  Synthetic
ccgttttttttttttctatacaa

SEQ ID NO: 17113 - DNA, 23 bp, Artificial Sequence
  Synthetic
ccgttttttttttttcacttgag

SEQ ID NO: 17114 - DNA, 23 bp, Artificial Sequence
  Synthetic
ccgttttttttttttaaatgcgt

SEQ ID NO: 17115 - DNA, 23 bp, Artificial Sequence
  Synthetic
ccgttttttttttttatacttct

SEQ ID NO: 17116 - DNA, 23 bp, Artificial Sequence
  Synthetic
ccgttttttttttttcattcacc

SEQ ID NO: 17117 - DNA, 23 bp, Artificial Sequence
  Synthetic
ccgttttttttttttacatcaaa

SEQ ID NO: 17118 - DNA, 23 bp, Artificial Sequence
  Synthetic
ccgttttttttttttagaatcat

SEQ ID NO: 17119 - DNA, 23 bp, Artificial Sequence
  Synthetic
ccgttttttttttttgtgaattc

SEQ ID NO: 17120 - DNA, 23 bp, Artificial Sequence
  Synthetic
ccgttttttttttttgatggaaa

SEQ ID NO: 17121 - DNA, 23 bp, Artificial Sequence
  Synthetic
ccgttttttttttttctggtcgc

SEQ ID NO: 17122 - DNA, 23 bp, Artificial Sequence
  Synthetic
ccgttttttttttttcctgttga

SEQ ID NO: 17123 - DNA, 23 bp, Artificial Sequence
  Synthetic
ccgttttttttttttccgcagtt

SEQ ID NO: 17124 - DNA, 23 bp, Artificial Sequence
  Synthetic
ccgttttttttttttcgcacatg

SEQ ID NO: 17125 - DNA, 23 bp, Artificial Sequence
  Synthetic
ccgttttttttttttgggtattc

SEQ ID NO: 17126 - DNA, 23 bp, Artificial Sequence
  Synthetic
ccgttttttttttttggccgggg

SEQ ID NO: 17127 - DNA, 23 bp, Artificial Sequence
  Synthetic
ccgttttttttttttcgtcatta

SEQ ID NO: 17128 - DNA, 23 bp, Artificial Sequence
  Synthetic
ccgttttttttttttgctgttcg

SEQ ID NO: 17129 - DNA, 23 bp, Artificial Sequence
  Synthetic
ccgttttttttttttaatggcat

SEQ ID NO: 17130 - DNA, 23 bp, Artificial Sequence
  Synthetic
ccgttttttttttttagtaccta

SEQ ID NO: 17131 - DNA, 23 bp, Artificial Sequence
  Synthetic
ccgttttttttttttgtactttt

SEQ ID NO: 17132 - DNA, 23 bp, Artificial Sequence
  Synthetic
ccgttttttttttttcgaagatt

SEQ ID NO: 17133 - DNA, 23 bp, Artificial Sequence
  Synthetic
ccgttttttttttttctcgcacc

SEQ ID NO: 17134 - DNA, 23 bp, Artificial Sequence
  Synthetic
ccgttttttttttttaagcaaag

SEQ ID NO: 17135 - DNA, 23 bp, Artificial Sequence
  Synthetic
ccgttttttttttttatcccgcc

SEQ ID NO: 17136 - DNA, 23 bp, Artificial Sequence
  Synthetic
ccgttttttttttttaccacttt

SEQ ID NO: 17137 - DNA, 23 bp, Artificial Sequence
  Synthetic
ccgttttttttttttgctacttg

SEQ ID NO: 17138 - DNA, 23 bp, Artificial Sequence
  Synthetic
ccgttttttttttttctcctacc

SEQ ID NO: 17139 - DNA, 23 bp, Artificial Sequence
  Synthetic
ccgttttttttttttgaagagaa

SEQ ID NO: 17140 - DNA, 23 bp, Artificial Sequence
  Synthetic
ccgttttttttttttgcgttatc

SEQ ID NO: 17141 - DNA, 23 bp, Artificial Sequence
  Synthetic
ccgttttttttttttaacgctca

SEQ ID NO: 17142 - DNA, 23 bp, Artificial Sequence
  Synthetic
ccgttttttttttttatgccaac

SEQ ID NO: 17143 - DNA, 23 bp, Artificial Sequence
  Synthetic
ccgttttttttttttaagagcgg

SEQ ID NO: 17144 - DNA, 23 bp, Artificial Sequence
  Synthetic
ccgttttttttttttcctgcggc

SEQ ID NO: 17145 - DNA, 23 bp, Artificial Sequence
  Synthetic
ccgttttttttttttcagtgtta

SEQ ID NO: 17146 - DNA, 23 bp, Artificial Sequence
  Synthetic
ccgttttttttttttacagtcgc

SEQ ID NO: 17147 - DNA, 23 bp, Artificial Sequence
  Synthetic
ccgttttttttttttagtcttct

SEQ ID NO: 17148 - DNA, 23 bp, Artificial Sequence
  Synthetic
ccgttttttttttttctgggtac

SEQ ID NO: 17149 - DNA, 23 bp, Artificial Sequence
  Synthetic
ccgttttttttttttaaggattc

SEQ ID NO: 17150 - DNA, 23 bp, Artificial Sequence
  Synthetic
ccgttttttttttttcagattag

SEQ ID NO: 17151 - DNA, 23 bp, Artificial Sequence
  Synthetic
ccgttttttttttttcaagagtt

SEQ ID NO: 17152 - DNA, 23 bp, Artificial Sequence
  Synthetic
ccgttttttttttttgaaaacta

SEQ ID NO: 17153 - DNA, 23 bp, Artificial Sequence
  Synthetic
ccgttttttttttttagaaaaca

SEQ ID NO: 17154 - DNA, 23 bp, Artificial Sequence
  Synthetic
ccgttttttttttttaacaacaa

SEQ ID NO: 17155 - DNA, 23 bp, Artificial Sequence
  Synthetic
ccgttttttttttttccaccctt

SEQ ID NO: 17156 - DNA, 23 bp, Artificial Sequence
  Synthetic
ccgttttttttttttgccaaagt

SEQ ID NO: 17157 - DNA, 23 bp, Artificial Sequence
  Synthetic
ccgttttttttttttagcagaca

SEQ ID NO: 17158 - DNA, 23 bp, Artificial Sequence
  Synthetic
ccgttttttttttttcaaactgc

SEQ ID NO: 17159 - DNA, 23 bp, Artificial Sequence
  Synthetic
ccgttttttttttttgccagagt

SEQ ID NO: 17160 - DNA, 23 bp, Artificial Sequence
  Synthetic
ccgttttttttttttcactgcta

SEQ ID NO: 17161 - DNA, 23 bp, Artificial Sequence
  Synthetic
ccgttttttttttttgctttccc

SEQ ID NO: 17162 - DNA, 23 bp, Artificial Sequence
  Synthetic
ccgttttttttttttaacaccca

SEQ ID NO: 17163 - DNA, 23 bp, Artificial Sequence
  Synthetic
ccgttttttttttttgccgacac

SEQ ID NO: 17164 - DNA, 23 bp, Artificial Sequence
  Synthetic
ccgttttttttttttaccagcta

SEQ ID NO: 17165 - DNA, 23 bp, Artificial Sequence
  Synthetic
ccgttttttttttttgctagttt

SEQ ID NO: 17166 - DNA, 23 bp, Artificial Sequence
  Synthetic
ccgttttttttttttaccaacac

SEQ ID NO: 17167 - DNA, 23 bp, Artificial Sequence
  Synthetic
ccgttttttttttttgagcagca

SEQ ID NO: 17168 - DNA, 23 bp, Artificial Sequence
  Synthetic
ccgttttttttttttagctcagg

SEQ ID NO: 17169 - DNA, 23 bp, Artificial Sequence
  Synthetic
ccgttttttttttttgttcgcgt

SEQ ID NO: 17170 - DNA, 23 bp, Artificial Sequence
  Synthetic
ccgttttttttttttgcaacgac

SEQ ID NO: 17171 - DNA, 23 bp, Artificial Sequence
  Synthetic
ccgttttttttttttgacaggga

SEQ ID NO: 17172 - DNA, 23 bp, Artificial Sequence
  Synthetic
ccgttttttttttttcagagaaa

SEQ ID NO: 17173 - DNA, 23 bp, Artificial Sequence
  Synthetic
ccgttttttttttttgcgaattt

SEQ ID NO: 17174 - DNA, 23 bp, Artificial Sequence
  Synthetic
ccgttttttttttttaacgggat

SEQ ID NO: 17175 - DNA, 23 bp, Artificial Sequence
  Synthetic
ccgttttttttttttgcaagtgt

SEQ ID NO: 17176 - DNA, 23 bp, Artificial Sequence
  Synthetic
ccgttttttttttttccagtttt

SEQ ID NO: 17177 - DNA, 23 bp, Artificial Sequence
  Synthetic
ccgttttttttttttagctgatt

SEQ ID NO: 17178 - DNA, 23 bp, Artificial Sequence
  Synthetic
ccgttttttttttttcacacgtg

SEQ ID NO: 17179 - DNA, 23 bp, Artificial Sequence
  Synthetic
ccgttttttttttttctgatgta

SEQ ID NO: 17180 - DNA, 23 bp, Artificial Sequence
  Synthetic
ccgttttttttttttgtgatttt

SEQ ID NO: 17181 - DNA, 23 bp, Artificial Sequence
  Synthetic
ccgttttttttttttagatgtta

SEQ ID NO: 17182 - DNA, 23 bp, Artificial Sequence
  Synthetic
ccgttttttttttttgacagcaa

SEQ ID NO: 17183 - DNA, 23 bp, Artificial Sequence
  Synthetic
ccgttttttttttttctgaatgt

SEQ ID NO: 17184 - DNA, 23 bp, Artificial Sequence
  Synthetic
ccgttttttttttttctgaatgt

SEQ ID NO: 17185 - DNA, 23 bp, Artificial Sequence
  Synthetic
ccgttttttttttttagagagcg

SEQ ID NO: 17186 - DNA, 23 bp, Artificial Sequence
  Synthetic
ccgttttttttttttagagagcg

SEQ ID NO: 17187 - DNA, 23 bp, Artificial Sequence
  Synthetic
ccgttttttttttttcatctact

SEQ ID NO: 17188 - DNA, 23 bp, Artificial Sequence
  Synthetic
ccgttttttttttttcagcttct

SEQ ID NO: 17189 - DNA, 23 bp, Artificial Sequence
  Synthetic
ccgttttttttttttcccaagaa

SEQ ID NO: 17190 - DNA, 23 bp, Artificial Sequence
  Synthetic
ccgttttttttttttcatggata

SEQ ID NO: 17191 - DNA, 23 bp, Artificial Sequence
  Synthetic
ccgttttttttttttcacggaaa

SEQ ID NO: 17192 - DNA, 23 bp, Artificial Sequence
  Synthetic
ccgttttttttttttcacggaaa

SEQ ID NO: 17193 - DNA, 23 bp, Artificial Sequence
  Synthetic
ccgttttttttttttggattatg

SEQ ID NO: 17194 - DNA, 23 bp, Artificial Sequence
  Synthetic
ccgttttttttttttagcagaaa

SEQ ID NO: 17195 - DNA, 23 bp, Artificial Sequence
  Synthetic
ccgttttttttttttagcggaaa

SEQ ID NO: 17196 - DNA, 23 bp, Artificial Sequence
  Synthetic
ccgttttttttttttaacccaaa

SEQ ID NO: 17197 - DNA, 23 bp, Artificial Sequence
  Synthetic
ccgttttttttttttacacagct

SEQ ID NO: 17198 - DNA, 23 bp, Artificial Sequence
  Synthetic
ccgttttttttttttccgtactg

SEQ ID NO: 17199 - DNA, 23 bp, Artificial Sequence
  Synthetic
ccgttttttttttttcatcctga

SEQ ID NO: 17200 - DNA, 23 bp, Artificial Sequence
  Synthetic
ccgttttttttttttactagaaa

SEQ ID NO: 17201 - DNA, 23 bp, Artificial Sequence
  Synthetic
ccgttttttttttttgatgagta

SEQ ID NO: 17202 - DNA, 23 bp, Artificial Sequence
  Synthetic
ccgttttttttttttaagctaga

SEQ ID NO: 17203 - DNA, 23 bp, Artificial Sequence
  Synthetic
ccgttttttttttttaactcgct

SEQ ID NO: 17204 - DNA, 23 bp, Artificial Sequence
  Synthetic
ccgttttttttttttgtaacgct

SEQ ID NO: 17205 - DNA, 23 bp, Artificial Sequence
  Synthetic
ccgttttttttttttgttacgct

SEQ ID NO: 17206 - DNA, 23 bp, Artificial Sequence
  Synthetic
ccgttttttttttttcatcccta

SEQ ID NO: 17207 - DNA, 23 bp, Artificial Sequence
  Synthetic
ccgttttttttttttctctttct

SEQ ID NO: 17208 - DNA, 23 bp, Artificial Sequence
  Synthetic
ccgttttttttttttgaaacacc

SEQ ID NO: 17209 - DNA, 23 bp, Artificial Sequence
  Synthetic
ccgttttttttttttctacccat

SEQ ID NO: 17210 - DNA, 23 bp, Artificial Sequence
  Synthetic
ccgttttttttttttatgccaac

SEQ ID NO: 17211 - DNA, 23 bp, Artificial Sequence
  Synthetic
ccgttttttttttttgaactgcc

SEQ ID NO: 17212 - DNA, 23 bp, Artificial Sequence
  Synthetic
ccgttttttttttttgactgcca

SEQ ID NO: 17213 - DNA, 23 bp, Artificial Sequence
  Synthetic
ccgttttttttttttagccggtt

SEQ ID NO: 17214 - DNA, 23 bp, Artificial Sequence
  Synthetic
ccgttttttttttttaggcttca

SEQ ID NO: 17215 - DNA, 23 bp, Artificial Sequence
  Synthetic
ccgttttttttttttacagctat

SEQ ID NO: 17216 - DNA, 23 bp, Artificial Sequence
  Synthetic
ccgttttttttttttacaaacaa

SEQ ID NO: 17217 - DNA, 23 bp, Artificial Sequence
  Synthetic
ccgttttttttttttctttggta

SEQ ID NO: 17218 - DNA, 23 bp, Artificial Sequence
  Synthetic
ccgttttttttttttgctttcaa

SEQ ID NO: 17219 - DNA, 23 bp, Artificial Sequence
  Synthetic
ccgttttttttttttagctttca

SEQ ID NO: 17220 - DNA, 23 bp, Artificial Sequence
  Synthetic
ccgttttttttttttggctttca

SEQ ID NO: 17221 - DNA, 23 bp, Artificial Sequence
  Synthetic
ccgttttttttttttgaatttat

SEQ ID NO: 17222 - DNA, 23 bp, Artificial Sequence
  Synthetic
ccgttttttttttttaatattac

SEQ ID NO: 17223 - DNA, 23 bp, Artificial Sequence
  Synthetic
ccgttttttttttttacgacttt

SEQ ID NO: 17224 - DNA, 23 bp, Artificial Sequence
  Synthetic
ccgttttttttttttctgtggca

SEQ ID NO: 17225 - DNA, 23 bp, Artificial Sequence
  Synthetic
ccgttttttttttttacctgaaa

SEQ ID NO: 17226 - DNA, 23 bp, Artificial Sequence
  Synthetic
ccgttttttttttttggcattca

SEQ ID NO: 17227 - DNA, 23 bp, Artificial Sequence
  Synthetic
ccgttttttttttttaggatttt

SEQ ID NO: 17228 - DNA, 23 bp, Artificial Sequence
  Synthetic
ccgttttttttttttggcattac

SEQ ID NO: 17229 - DNA, 23 bp, Artificial Sequence
  Synthetic
ccgttttttttttttggacatcc

SEQ ID NO: 17230 - DNA, 23 bp, Artificial Sequence
  Synthetic
ccgttttttttttttcagctaac

SEQ ID NO: 17231 - DNA, 23 bp, Artificial Sequence
  Synthetic
ccgttttttttttttggaacaca

SEQ ID NO: 17232 - DNA, 23 bp, Artificial Sequence
  Synthetic
ccgttttttttttttcagctttc

SEQ ID NO: 17233 - DNA, 23 bp, Artificial Sequence
  Synthetic
ccgttttttttttttatacaacc

SEQ ID NO: 17234 - DNA, 23 bp, Artificial Sequence
  Synthetic
ccgttttttttttttcatacttc

SEQ ID NO: 17235 - DNA, 23 bp, Artificial Sequence
  Synthetic
ccgttttttttttttaaattcgg

SEQ ID NO: 17236 - DNA, 23 bp, Artificial Sequence
  Synthetic
ccgttttttttttttcaagttcg

SEQ ID NO: 17237 - DNA, 23 bp, Artificial Sequence
  Synthetic
ccgttttttttttttaagaactc

SEQ ID NO: 17238 - DNA, 23 bp, Artificial Sequence
  Synthetic
ccgttttttttttttcagtacct

SEQ ID NO: 17239 - DNA, 23 bp, Artificial Sequence
  Synthetic
ccgttttttttttttgcattcac

SEQ ID NO: 17240 - DNA, 23 bp, Artificial Sequence
  Synthetic
ccgttttttttttttcaagttag

SEQ ID NO: 17241 - DNA, 23 bp, Artificial Sequence
  Synthetic
ccgttttttttttttagctggtt

SEQ ID NO: 17242 - DNA, 23 bp, Artificial Sequence
  Synthetic
ccgttttttttttttcatcaaaa

SEQ ID NO: 17243 - DNA, 23 bp, Artificial Sequence
  Synthetic
ccgttttttttttttcgtcaaaa

SEQ ID NO: 17244 - DNA, 23 bp, Artificial Sequence
  Synthetic
ccgttttttttttttgagagaga

SEQ ID NO: 17245 - DNA, 23 bp, Artificial Sequence
  Synthetic
ccgttttttttttttccttatca

SEQ ID NO: 17246 - DNA, 23 bp, Artificial Sequence
  Synthetic
ccgttttttttttttgggcgaga

SEQ ID NO: 17247 - DNA, 23 bp, Artificial Sequence
  Synthetic
ccgttttttttttttccgctgtc

SEQ ID NO: 17248 - DNA, 23 bp, Artificial Sequence
  Synthetic
ccgttttttttttttagaattgc

SEQ ID NO: 17249 - DNA, 23 bp, Artificial Sequence
  Synthetic
ccgttttttttttttaattcttc

SEQ ID NO: 17250 - DNA, 23 bp, Artificial Sequence
  Synthetic
ccgttttttttttttaattctcc

SEQ ID NO: 17251 - DNA, 23 bp, Artificial Sequence
  Synthetic
ccgttttttttttttcccgttag

SEQ ID NO: 17252 - DNA, 23 bp, Artificial Sequence
  Synthetic
ccgttttttttttttcgcgctac

SEQ ID NO: 17253 - DNA, 23 bp, Artificial Sequence
  Synthetic
ccgttttttttttttaggaactc

SEQ ID NO: 17254 - DNA, 23 bp, Artificial Sequence
  Synthetic
ccgttttttttttttagcacggt

SEQ ID NO: 17255 - DNA, 23 bp, Artificial Sequence
  Synthetic
ccgttttttttttttagcacggt

SEQ ID NO: 17256 - DNA, 23 bp, Artificial Sequence
  Synthetic
ccgttttttttttttgtaccaga

SEQ ID NO: 17257 - DNA, 23 bp, Artificial Sequence
  Synthetic
ccgttttttttttttacggacga

SEQ ID NO: 17258 - DNA, 23 bp, Artificial Sequence
  Synthetic
ccgttttttttttttgagtgtgg

SEQ ID NO: 17259 - DNA, 23 bp, Artificial Sequence
  Synthetic
ccgttttttttttttatttcata

SEQ ID NO: 17260 - DNA, 23 bp, Artificial Sequence
  Synthetic
ccgttttttttttttaaagagag

SEQ ID NO: 17261 - DNA, 23 bp, Artificial Sequence
  Synthetic
ccgttttttttttttgtcgacgg

SEQ ID NO: 17262 - DNA, 23 bp, Artificial Sequence
  Synthetic
ccgttttttttttttgtcgacgg

SEQ ID NO: 17263 - DNA, 23 bp, Artificial Sequence
  Synthetic
ccgttttttttttttagacaaag

SEQ ID NO: 17264 - DNA, 23 bp, Artificial Sequence
  Synthetic
ccgttttttttttttaattacca

SEQ ID NO: 17265 - DNA, 23 bp, Artificial Sequence
  Synthetic
ccgttttttttttttattgctgg

SEQ ID NO: 17266 - DNA, 23 bp, Artificial Sequence
  Synthetic
ccgttttttttttttactgattt

SEQ ID NO: 17267 - DNA, 23 bp, Artificial Sequence
  Synthetic
ccgttttttttttttcacgagtg

SEQ ID NO: 17268 - DNA, 23 bp, Artificial Sequence
  Synthetic
ccgttttttttttttcaaacgat

SEQ ID NO: 17269 - DNA, 23 bp, Artificial Sequence
  Synthetic
ccgttttttttttttgaaatgaa

SEQ ID NO: 17270 - DNA, 23 bp, Artificial Sequence
  Synthetic
ccgttttttttttttcgcaggct

SEQ ID NO: 17271 - DNA, 23 bp, Artificial Sequence
  Synthetic
ccgttttttttttttcatcaaag

SEQ ID NO: 17272 - DNA, 23 bp, Artificial Sequence
  Synthetic
ccgttttttttttttcctcaaag

SEQ ID NO: 17273 - DNA, 23 bp, Artificial Sequence
  Synthetic
ccgttttttttttttccatcaaa

SEQ ID NO: 17274 - DNA, 23 bp, Artificial Sequence
  Synthetic
ccgttttttttttttgacacact

SEQ ID NO: 17275 - DNA, 23 bp, Artificial Sequence
  Synthetic
ccgttttttttttttcagtttcc

SEQ ID NO: 17276 - DNA, 23 bp, Artificial Sequence
  Synthetic
ccgttttttttttttacatttac

SEQ ID NO: 17277 - DNA, 23 bp, Artificial Sequence
  Synthetic
ccgttttttttttttgagcacct

SEQ ID NO: 17278 - DNA, 23 bp, Artificial Sequence
  Synthetic
ccgttttttttttttgagtcact

SEQ ID NO: 17279 - DNA, 23 bp, Artificial Sequence
  Synthetic
ccgttttttttttttacaggcac

SEQ ID NO: 17280 - DNA, 23 bp, Artificial Sequence
  Synthetic
ccgttttttttttttactcaagg

SEQ ID NO: 17281 - DNA, 23 bp, Artificial Sequence
  Synthetic
ccgttttttttttttacagtata

SEQ ID NO: 17282 - DNA, 23 bp, Artificial Sequence
  Synthetic
ccgttttttttttttgacaaact

SEQ ID NO: 17283 - DNA, 23 bp, Artificial Sequence
  Synthetic
ccgttttttttttttaggccggg

SEQ ID NO: 17284 - DNA, 23 bp, Artificial Sequence
  Synthetic
ccgttttttttttttggccggtg

SEQ ID NO: 17285 - DNA, 23 bp, Artificial Sequence
  Synthetic
ccgttttttttttttggccgtct

SEQ ID NO: 17286 - DNA, 23 bp, Artificial Sequence
  Synthetic
ccgttttttttttttggctgtga

SEQ ID NO: 17287 - DNA, 23 bp, Artificial Sequence
  Synthetic
ccgttttttttttttgaacttat

SEQ ID NO: 17288 - DNA, 23 bp, Artificial Sequence
  Synthetic
ccgttttttttttttctgagcaa

SEQ ID NO: 17289 - DNA, 23 bp, Artificial Sequence
  Synthetic
ccgttttttttttttccagtaag

SEQ ID NO: 17290 - DNA, 23 bp, Artificial Sequence
  Synthetic
ccgttttttttttttggatacca

SEQ ID NO: 17291 - DNA, 23 bp, Artificial Sequence
  Synthetic
ccgttttttttttttgataaaca

SEQ ID NO: 17292 - DNA, 23 bp, Artificial Sequence
  Synthetic
ccgttttttttttttgctatgcc

SEQ ID NO: 17293 - DNA, 23 bp, Artificial Sequence
  Synthetic
ccgttttttttttttgctattcc

SEQ ID NO: 17294 - DNA, 23 bp, Artificial Sequence
  Synthetic
ccgttttttttttttatgcgact

SEQ ID NO: 17295 - DNA, 23 bp, Artificial Sequence
  Synthetic
ccgttttttttttttaccagcta

SEQ ID NO: 17296 - DNA, 23 bp, Artificial Sequence
  Synthetic
ccgttttttttttttatggttgt

SEQ ID NO: 17297 - DNA, 23 bp, Artificial Sequence
  Synthetic
ccgttttttttttttatcacaac

SEQ ID NO: 17298 - DNA, 23 bp, Artificial Sequence
  Synthetic
ccgttttttttttttaaagaaca

SEQ ID NO: 17299 - DNA, 23 bp, Artificial Sequence
  Synthetic
ccgttttttttttttaacaaaat

SEQ ID NO: 17300 - DNA, 23 bp, Artificial Sequence
  Synthetic
ccgttttttttttttctttggta

SEQ ID NO: 17301 - DNA, 23 bp, Artificial Sequence
  Synthetic
ccgttttttttttttcatcttta

SEQ ID NO: 17302 - DNA, 23 bp, Artificial Sequence
  Synthetic
ccgttttttttttttcacctgaa

SEQ ID NO: 17303 - DNA, 23 bp, Artificial Sequence
  Synthetic
ccgttttttttttttggccggga

SEQ ID NO: 17304 - DNA, 23 bp, Artificial Sequence
  Synthetic
ccgttttttttttttaggccggg

SEQ ID NO: 17305 - DNA, 23 bp, Artificial Sequence
  Synthetic
ccgttttttttttttacagctag

SEQ ID NO: 17306 - DNA, 23 bp, Artificial Sequence
  Synthetic
ccgttttttttttttacagctaa

SEQ ID NO: 17307 - DNA, 23 bp, Artificial Sequence
  Synthetic
ccgttttttttttttcagctaga

SEQ ID NO: 17308 - DNA, 23 bp, Artificial Sequence
  Synthetic
ccgttttttttttttcgtatact

SEQ ID NO: 17309 - DNA, 23 bp, Artificial Sequence
  Synthetic
ccgttttttttttttggatacat

SEQ ID NO: 17310 - DNA, 23 bp, Artificial Sequence
  Synthetic
ccgttttttttttttcagctttc

SEQ ID NO: 17311 - DNA, 23 bp, Artificial Sequence
  Synthetic
ccgttttttttttttatacaacc

SEQ ID NO: 17312 - DNA, 23 bp, Artificial Sequence
  Synthetic
ccgttttttttttttcatacttc

SEQ ID NO: 17313 - DNA, 23 bp, Artificial Sequence
  Synthetic
ccgttttttttttttaaattcgg

SEQ ID NO: 17314 - DNA, 23 bp, Artificial Sequence
  Synthetic
ccgttttttttttttcaagttcg

SEQ ID NO: 17315 - DNA, 23 bp, Artificial Sequence
  Synthetic
ccgttttttttttttaagaactc

SEQ ID NO: 17316 - DNA, 23 bp, Artificial Sequence
  Synthetic
ccgttttttttttttcagtacct

SEQ ID NO: 17317 - DNA, 23 bp, Artificial Sequence
  Synthetic
ccgttttttttttttgcattcac

SEQ ID NO: 17318 - DNA, 23 bp, Artificial Sequence
  Synthetic
ccgttttttttttttcaagttag

SEQ ID NO: 17319 - DNA, 23 bp, Artificial Sequence
  Synthetic
ccgttttttttttttagctggtt

SEQ ID NO: 17320 - DNA, 23 bp, Artificial Sequence
  Synthetic
ccgttttttttttttcatcaaaa

SEQ ID NO: 17321 - DNA, 23 bp, Artificial Sequence
  Synthetic
ccgttttttttttttcgtcaaaa

SEQ ID NO: 17322 - DNA, 23 bp, Artificial Sequence
  Synthetic
ccgttttttttttttgagagaga

SEQ ID NO: 17323 - DNA, 23 bp, Artificial Sequence
  Synthetic
ccgttttttttttttccttatca

SEQ ID NO: 17324 - DNA, 23 bp, Artificial Sequence
  Synthetic
ccgttttttttttttccgctgtc

SEQ ID NO: 17325 - DNA, 23 bp, Artificial Sequence
  Synthetic
ccgttttttttttttagaattgc

SEQ ID NO: 17326 - DNA, 23 bp, Artificial Sequence
  Synthetic
ccgttttttttttttaattcttc

SEQ ID NO: 17327 - DNA, 23 bp, Artificial Sequence
  Synthetic
ccgttttttttttttaattctcc

SEQ ID NO: 17328 - DNA, 23 bp, Artificial Sequence
  Synthetic
ccgttttttttttttcccgttag

SEQ ID NO: 17329 - DNA, 23 bp, Artificial Sequence
  Synthetic
ccgttttttttttttcgcgctac

SEQ ID NO: 17330 - DNA, 23 bp, Artificial Sequence
  Synthetic
ccgttttttttttttagcacggt

SEQ ID NO: 17331 - DNA, 23 bp, Artificial Sequence
  Synthetic
ccgttttttttttttagcacggt

SEQ ID NO: 17332 - DNA, 23 bp, Artificial Sequence
  Synthetic
ccgttttttttttttgtaccaga

SEQ ID NO: 17333 - DNA, 23 bp, Artificial Sequence
  Synthetic
ccgttttttttttttacggacga

SEQ ID NO: 17334 - DNA, 23 bp, Artificial Sequence
  Synthetic
ccgttttttttttttgagtgtgg

SEQ ID NO: 17335 - DNA, 23 bp, Artificial Sequence
  Synthetic
ccgttttttttttttatttcata

SEQ ID NO: 17336 - DNA, 23 bp, Artificial Sequence
  Synthetic
ccgttttttttttttaaagagag

SEQ ID NO: 17337 - DNA, 23 bp, Artificial Sequence
  Synthetic
ccgttttttttttttagacaaag

SEQ ID NO: 17338 - DNA, 23 bp, Artificial Sequence
  Synthetic
ccgttttttttttttaattacca

SEQ ID NO: 17339 - DNA, 23 bp, Artificial Sequence
  Synthetic
ccgttttttttttttattgctgg

SEQ ID NO: 17340 - DNA, 23 bp, Artificial Sequence
  Synthetic
ccgttttttttttttactgattt

SEQ ID NO: 17341 - DNA, 23 bp, Artificial Sequence
  Synthetic
ccgttttttttttttcacgagtg

SEQ ID NO: 17342 - DNA, 23 bp, Artificial Sequence
  Synthetic
ccgttttttttttttcaaacgat

SEQ ID NO: 17343 - DNA, 23 bp, Artificial Sequence
  Synthetic
ccgttttttttttttgaaatgaa

SEQ ID NO: 17344 - DNA, 23 bp, Artificial Sequence
  Synthetic
ccgttttttttttttcgcaggct

SEQ ID NO: 17345 - DNA, 23 bp, Artificial Sequence
  Synthetic
ccgttttttttttttcatcaaag

SEQ ID NO: 17346 - DNA, 23 bp, Artificial Sequence
  Synthetic
ccgttttttttttttcctcaaag

SEQ ID NO: 17347 - DNA, 23 bp, Artificial Sequence
  Synthetic
ccgttttttttttttccatcaaa

SEQ ID NO: 17348 - DNA, 23 bp, Artificial Sequence
  Synthetic
ccgttttttttttttgacacact

SEQ ID NO: 17349 - DNA, 23 bp, Artificial Sequence
  Synthetic
ccgttttttttttttacatttac

SEQ ID NO: 17350 - DNA, 23 bp, Artificial Sequence
  Synthetic
ccgttttttttttttgagcacct

SEQ ID NO: 17351 - DNA, 23 bp, Artificial Sequence
  Synthetic
ccgttttttttttttgagtcact

SEQ ID NO: 17352 - DNA, 23 bp, Artificial Sequence
  Synthetic
ccgttttttttttttactcaagg

SEQ ID NO: 17353 - DNA, 23 bp, Artificial Sequence
  Synthetic
ccgttttttttttttacagtata

SEQ ID NO: 17354 - DNA, 23 bp, Artificial Sequence
  Synthetic
ccgttttttttttttgacaaact

SEQ ID NO: 17355 - DNA, 23 bp, Artificial Sequence
  Synthetic
ccgttttttttttttgaacttat

SEQ ID NO: 17356 - DNA, 23 bp, Artificial Sequence
  Synthetic
ccgttttttttttttctgagcaa

SEQ ID NO: 17357 - DNA, 23 bp, Artificial Sequence
  Synthetic
ccgttttttttttttccagtaag

SEQ ID NO: 17358 - DNA, 23 bp, Artificial Sequence
  Synthetic
ccgttttttttttttgataccac

SEQ ID NO: 17359 - DNA, 23 bp, Artificial Sequence
  Synthetic
ccgttttttttttttgataaaca

SEQ ID NO: 17360 - DNA, 23 bp, Artificial Sequence
  Synthetic
ccgttttttttttttgctatgcc

SEQ ID NO: 17361 - DNA, 23 bp, Artificial Sequence
  Synthetic
ccgttttttttttttgctattcc

SEQ ID NO: 17362 - DNA, 23 bp, Artificial Sequence
  Synthetic
ccgttttttttttttatgcgact

SEQ ID NO: 17363 - DNA, 23 bp, Artificial Sequence
  Synthetic
ccgttttttttttttaccagcta

SEQ ID NO: 17364 - DNA, 23 bp, Artificial Sequence
  Synthetic
ccgttttttttttttatggttgt

SEQ ID NO: 17365 - DNA, 23 bp, Artificial Sequence
  Synthetic
ccgttttttttttttatcacaac

SEQ ID NO: 17366 - DNA, 23 bp, Artificial Sequence
  Synthetic
ccgttttttttttttaaagaaca

SEQ ID NO: 17367 - DNA, 23 bp, Artificial Sequence
  Synthetic
ccgttttttttttttaacaaaat

SEQ ID NO: 17368 - DNA, 23 bp, Artificial Sequence
  Synthetic
ccgttttttttttttctttggta

SEQ ID NO: 17369 - DNA, 23 bp, Artificial Sequence
  Synthetic
ccgttttttttttttcatcttta

SEQ ID NO: 17370 - DNA, 23 bp, Artificial Sequence
  Synthetic
ccgttttttttttttcacctgaa

SEQ ID NO: 17371 - DNA, 23 bp, Artificial Sequence
  Synthetic
ccgttttttttttttggccggga

SEQ ID NO: 17372 - DNA, 23 bp, Artificial Sequence
  Synthetic
ccgttttttttttttaggccggg

SEQ ID NO: 17373 - DNA, 23 bp, Artificial Sequence
  Synthetic
ccgttttttttttttacagctag

SEQ ID NO: 17374 - DNA, 23 bp, Artificial Sequence
  Synthetic
ccgttttttttttttacagctaa

SEQ ID NO: 17375 - DNA, 23 bp, Artificial Sequence
  Synthetic
ccgttttttttttttcagctaga

SEQ ID NO: 17376 - DNA, 23 bp, Artificial Sequence
  Synthetic
ccgttttttttttttcgtatact

SEQ ID NO: 17377 - DNA, 23 bp, Artificial Sequence
  Synthetic
ccgttttttttttttggatacat

SEQ ID NO: 17378 - DNA, 23 bp, Artificial Sequence
  Synthetic
ccgttttttttttttctatacaa

SEQ ID NO: 17379 - DNA, 23 bp, Artificial Sequence
  Synthetic
ccgttttttttttttccacacaa

SEQ ID NO: 17380 - DNA, 23 bp, Artificial Sequence
  Synthetic
ccgttttttttttttccatacaa

SEQ ID NO: 17381 - DNA, 23 bp, Artificial Sequence
  Synthetic
ccgttttttttttttccatacaa

SEQ ID NO: 17382 - DNA, 23 bp, Artificial Sequence
  Synthetic
ccgttttttttttttctattcaa

SEQ ID NO: 17383 - DNA, 23 bp, Artificial Sequence
  Synthetic
ccgttttttttttttctatacaa

SEQ ID NO: 17384 - DNA, 23 bp, Artificial Sequence
  Synthetic
ccgttttttttttttctatacaa

SEQ ID NO: 17385 - DNA, 23 bp, Artificial Sequence
  Synthetic
ccgttttttttttttcaacacaa

SEQ ID NO: 17386 - DNA, 23 bp, Artificial Sequence
  Synthetic
ccgttttttttttttcagcacaa

SEQ ID NO: 17387 - DNA, 23 bp, Artificial Sequence
  Synthetic
ccgttttttttttttctgtacaa

SEQ ID NO: 17388 - DNA, 23 bp, Artificial Sequence
  Synthetic
ccgttttttttttttcatacttc

SEQ ID NO: 17389 - DNA, 23 bp, Artificial Sequence
  Synthetic
ccgttttttttttttcaagttcg

SEQ ID NO: 17390 - DNA, 23 bp, Artificial Sequence
  Synthetic
ccgttttttttttttagttatca

SEQ ID NO: 17391 - DNA, 23 bp, Artificial Sequence
  Synthetic
ccgttttttttttttagttatca

SEQ ID NO: 17392 - DNA, 23 bp, Artificial Sequence
  Synthetic
ccgttttttttttttagccctgt

SEQ ID NO: 17393 - DNA, 23 bp, Artificial Sequence
  Synthetic
ccgttttttttttttagccctgt

SEQ ID NO: 17394 - DNA, 23 bp, Artificial Sequence
  Synthetic
ccgttttttttttttaaattcgg

SEQ ID NO: 17395 - DNA, 23 bp, Artificial Sequence
  Synthetic
ccgttttttttttttcccaagac

SEQ ID NO: 17396 - DNA, 23 bp, Artificial Sequence
  Synthetic
ccgttttttttttttcaaattcg

SEQ ID NO: 17397 - DNA, 23 bp, Artificial Sequence
  Synthetic
ccgttttttttttttaaatccgg

SEQ ID NO: 17398 - DNA, 23 bp, Artificial Sequence
  Synthetic
ccgttttttttttttcacattcg

SEQ ID NO: 17399 - DNA, 23 bp, Artificial Sequence
  Synthetic
ccgttttttttttttcccctaaa

SEQ ID NO: 17400 - DNA, 23 bp, Artificial Sequence
  Synthetic
ccgttttttttttttaacaccat

SEQ ID NO: 17401 - DNA, 23 bp, Artificial Sequence
  Synthetic
ccgttttttttttttcattcacc

SEQ ID NO: 17402 - DNA, 23 bp, Artificial Sequence
  Synthetic
ccgttttttttttttcaggttaa

SEQ ID NO: 17403 - DNA, 23 bp, Artificial Sequence
  Synthetic
ccgttttttttttttcaagttag

SEQ ID NO: 17404 - DNA, 23 bp, Artificial Sequence
  Synthetic
ccgttttttttttttcgagttag

SEQ ID NO: 17405 - DNA, 23 bp, Artificial Sequence
  Synthetic
ccgttttttttttttattattac

SEQ ID NO: 17406 - DNA, 23 bp, Artificial Sequence
  Synthetic
ccgttttttttttttcgtaccaa

SEQ ID NO: 17407 - DNA, 23 bp, Artificial Sequence
  Synthetic
ccgttttttttttttaagagacc

SEQ ID NO: 17408 - DNA, 23 bp, Artificial Sequence
  Synthetic
ccgttttttttttttcaagccca

SEQ ID NO: 17409 - DNA, 23 bp, Artificial Sequence
  Synthetic
ccgttttttttttttctttttgg

SEQ ID NO: 17410 - DNA, 23 bp, Artificial Sequence
  Synthetic
ccgttttttttttttccctttta

SEQ ID NO: 17411 - DNA, 23 bp, Artificial Sequence
  Synthetic
ccgttttttttttttccctttca

SEQ ID NO: 17412 - DNA, 23 bp, Artificial Sequence
  Synthetic
ccgttttttttttttccctttta

SEQ ID NO: 17413 - DNA, 23 bp, Artificial Sequence
  Synthetic
ccgttttttttttttaccatggc

SEQ ID NO: 17414 - DNA, 23 bp, Artificial Sequence
  Synthetic
ccgttttttttttttaacaatct

SEQ ID NO: 17415 - DNA, 23 bp, Artificial Sequence
  Synthetic
ccgttttttttttttgctggttg

SEQ ID NO: 17416 - DNA, 23 bp, Artificial Sequence
  Synthetic
ccgttttttttttttgttccatt

SEQ ID NO: 17417 - DNA, 23 bp, Artificial Sequence
  Synthetic
ccgttttttttttttctggttga

SEQ ID NO: 17418 - DNA, 23 bp, Artificial Sequence
  Synthetic
ccgttttttttttttcttggttc

SEQ ID NO: 17419 - DNA, 23 bp, Artificial Sequence
  Synthetic
ccgttttttttttttctggttga

SEQ ID NO: 17420 - DNA, 23 bp, Artificial Sequence
  Synthetic
ccgttttttttttttcataggaa

SEQ ID NO: 17421 - DNA, 23 bp, Artificial Sequence
  Synthetic
ccgttttttttttttgataggaa

SEQ ID NO: 17422 - DNA, 23 bp, Artificial Sequence
  Synthetic
ccgttttttttttttcataggaa

SEQ ID NO: 17423 - DNA, 23 bp, Artificial Sequence
  Synthetic
ccgttttttttttttgcgtattc

SEQ ID NO: 17424 - DNA, 23 bp, Artificial Sequence
  Synthetic
ccgttttttttttttcctgattc

SEQ ID NO: 17425 - DNA, 23 bp, Artificial Sequence
  Synthetic
ccgttttttttttttacacatgc

SEQ ID NO: 17426 - DNA, 23 bp, Artificial Sequence
  Synthetic
ccgttttttttttttccataggg

SEQ ID NO: 17427 - DNA, 23 bp, Artificial Sequence
  Synthetic
ccgttttttttttttcgtggttc

SEQ ID NO: 17428 - DNA, 23 bp, Artificial Sequence
  Synthetic
ccgttttttttttttatcgttac

SEQ ID NO: 17429 - DNA, 23 bp, Artificial Sequence
  Synthetic
ccgttttttttttttataaagta

SEQ ID NO: 17430 - DNA, 23 bp, Artificial Sequence
  Synthetic
ccgttttttttttttagtgcttt

SEQ ID NO: 17431 - DNA, 23 bp, Artificial Sequence
  Synthetic
ccgttttttttttttagtgctgt

SEQ ID NO: 17432 - DNA, 23 bp, Artificial Sequence
  Synthetic
ccgttttttttttttgctacagt

SEQ ID NO: 17433 - DNA, 23 bp, Artificial Sequence
  Synthetic
ccgttttttttttttacatcatc

SEQ ID NO: 17434 - DNA, 23 bp, Artificial Sequence
  Synthetic
ccgttttttttttttgattcctg

SEQ ID NO: 17435 - DNA, 23 bp, Artificial Sequence
  Synthetic
ccgttttttttttttatctatgg

SEQ ID NO: 17436 - DNA, 23 bp, Artificial Sequence
  Synthetic
ccgttttttttttttcccttgga

SEQ ID NO: 17437 - DNA, 23 bp, Artificial Sequence
  Synthetic
ccgttttttttttttaaagttct

SEQ ID NO: 17438 - DNA, 23 bp, Artificial Sequence
  Synthetic
ccgttttttttttttctggtaca

SEQ ID NO: 17439 - DNA, 23 bp, Artificial Sequence
  Synthetic
ccgttttttttttttaaagttct

SEQ ID NO: 17440 - DNA, 23 bp, Artificial Sequence
  Synthetic
ccgttttttttttttcacttttg

SEQ ID NO: 17441 - DNA, 23 bp, Artificial Sequence
  Synthetic
ccgttttttttttttcatttttg

SEQ ID NO: 17442 - DNA, 23 bp, Artificial Sequence
  Synthetic
ccgttttttttttttcatttttg

SEQ ID NO: 17443 - DNA, 23 bp, Artificial Sequence
  Synthetic
ccgttttttttttttcctatcac

SEQ ID NO: 17444 - DNA, 23 bp, Artificial Sequence
  Synthetic
ccgttttttttttttcaaaccat

SEQ ID NO: 17445 - DNA, 23 bp, Artificial Sequence
  Synthetic
ccgttttttttttttcgcagcac

SEQ ID NO: 17446 - DNA, 23 bp, Artificial Sequence
  Synthetic
ccgttttttttttttaaaccatg

SEQ ID NO: 17447 - DNA, 23 bp, Artificial Sequence
  Synthetic
ccgttttttttttttaaaccatg

SEQ ID NO: 17448 - DNA, 23 bp, Artificial Sequence
  Synthetic
ccgttttttttttttccaatatt

SEQ ID NO: 17449 - DNA, 23 bp, Artificial Sequence
  Synthetic
ccgttttttttttttcaatattt

SEQ ID NO: 17450 - DNA, 23 bp, Artificial Sequence
  Synthetic
ccgttttttttttttcaatattt

SEQ ID NO: 17451 - DNA, 23 bp, Artificial Sequence
  Synthetic
ccgttttttttttttctgcactg

SEQ ID NO: 17452 - DNA, 23 bp, Artificial Sequence
  Synthetic
ccgttttttttttttgaagtgcc

SEQ ID NO: 17453 - DNA, 23 bp, Artificial Sequence
  Synthetic
ccgttttttttttttcaccgaca

SEQ ID NO: 17454 - DNA, 23 bp, Artificial Sequence
  Synthetic
ccgttttttttttttacaatcaa

SEQ ID NO: 17455 - DNA, 23 bp, Artificial Sequence
  Synthetic
ccgttttttttttttcaccgaca

SEQ ID NO: 17456 - DNA, 23 bp, Artificial Sequence
  Synthetic
ccgttttttttttttcaccgaca

SEQ ID NO: 17457 - DNA, 23 bp, Artificial Sequence
  Synthetic
ccgttttttttttttagttctac

SEQ ID NO: 17458 - DNA, 23 bp, Artificial Sequence
  Synthetic
ccgttttttttttttggcaagtc

SEQ ID NO: 17459 - DNA, 23 bp, Artificial Sequence
  Synthetic
ccgttttttttttttgtgaattc

SEQ ID NO: 17460 - DNA, 23 bp, Artificial Sequence
  Synthetic
ccgttttttttttttccttatca

SEQ ID NO: 17461 - DNA, 23 bp, Artificial Sequence
  Synthetic
ccgttttttttttttctgcaaca

SEQ ID NO: 17462 - DNA, 23 bp, Artificial Sequence
  Synthetic
ccgttttttttttttgcactaga

SEQ ID NO: 17463 - DNA, 23 bp, Artificial Sequence
  Synthetic
ccgttttttttttttgcactaaa

SEQ ID NO: 17464 - DNA, 23 bp, Artificial Sequence
  Synthetic
ccgttttttttttttagaagggg

SEQ ID NO: 17465 - DNA, 23 bp, Artificial Sequence
  Synthetic
ccgttttttttttttctacacaa

SEQ ID NO: 17466 - DNA, 23 bp, Artificial Sequence
  Synthetic
ccgttttttttttttctaatata

SEQ ID NO: 17467 - DNA, 23 bp, Artificial Sequence
  Synthetic
ccgttttttttttttaccgaata

SEQ ID NO: 17468 - DNA, 23 bp, Artificial Sequence
  Synthetic
ccgttttttttttttctgtcaat

SEQ ID NO: 17469 - DNA, 23 bp, Artificial Sequence
  Synthetic
ccgttttttttttttgggacttt

SEQ ID NO: 17470 - DNA, 23 bp, Artificial Sequence
  Synthetic
ccgttttttttttttcgggactt

SEQ ID NO: 17471 - DNA, 23 bp, Artificial Sequence
  Synthetic
ccgttttttttttttacatggag

SEQ ID NO: 17472 - DNA, 23 bp, Artificial Sequence
  Synthetic
ccgttttttttttttacatggag

SEQ ID NO: 17473 - DNA, 23 bp, Artificial Sequence
  Synthetic
ccgttttttttttttcaacaaca

SEQ ID NO: 17474 - DNA, 23 bp, Artificial Sequence
  Synthetic
ccgttttttttttttcaacaact

SEQ ID NO: 17475 - DNA, 23 bp, Artificial Sequence
  Synthetic
ccgttttttttttttacaggtag

SEQ ID NO: 17476 - DNA, 23 bp, Artificial Sequence
  Synthetic
ccgttttttttttttccaatgtg

SEQ ID NO: 17477 - DNA, 23 bp, Artificial Sequence
  Synthetic
ccgttttttttttttgttttgca

SEQ ID NO: 17478 - DNA, 23 bp, Artificial Sequence
  Synthetic
ccgttttttttttttgcaactat

SEQ ID NO: 17479 - DNA, 23 bp, Artificial Sequence
  Synthetic
ccgttttttttttttgttttgca

SEQ ID NO: 17480 - DNA, 23 bp, Artificial Sequence
  Synthetic
ccgttttttttttttaatgcaaa

SEQ ID NO: 17481 - DNA, 23 bp, Artificial Sequence
  Synthetic
ccgttttttttttttagttttgc

SEQ ID NO: 17482 - DNA, 23 bp, Artificial Sequence
  Synthetic
ccgttttttttttttgttttgca

SEQ ID NO: 17483 - DNA, 23 bp, Artificial Sequence
  Synthetic
ccgttttttttttttatcgttac

SEQ ID NO: 17484 - DNA, 23 bp, Artificial Sequence
  Synthetic
ccgttttttttttttcattacca

SEQ ID NO: 17485 - DNA, 23 bp, Artificial Sequence
  Synthetic
ccgttttttttttttatcattac

SEQ ID NO: 17486 - DNA, 23 bp, Artificial Sequence
  Synthetic
ccgttttttttttttcatgccct

SEQ ID NO: 17487 - DNA, 23 bp, Artificial Sequence
  Synthetic
ccgttttttttttttaagaggta

SEQ ID NO: 17488 - DNA, 23 bp, Artificial Sequence
  Synthetic
ccgttttttttttttagtggtcc

SEQ ID NO: 17489 - DNA, 23 bp, Artificial Sequence
  Synthetic
ccgttttttttttttagtggtcc

SEQ ID NO: 17490 - DNA, 23 bp, Artificial Sequence
  Synthetic
ccgttttttttttttaactgttg

SEQ ID NO: 17491 - DNA, 23 bp, Artificial Sequence
  Synthetic
ccgttttttttttttgcatagga

SEQ ID NO: 17492 - DNA, 23 bp, Artificial Sequence
  Synthetic
ccgttttttttttttgactccgg

SEQ ID NO: 17493 - DNA, 23 bp, Artificial Sequence
  Synthetic
ccgttttttttttttacacactt

SEQ ID NO: 17494 - DNA, 23 bp, Artificial Sequence
  Synthetic
ccgttttttttttttcctgcact

SEQ ID NO: 17495 - DNA, 23 bp, Artificial Sequence
  Synthetic
ccgttttttttttttaagtgctc

SEQ ID NO: 17496 - DNA, 23 bp, Artificial Sequence
  Synthetic
ccgttttttttttttcctgcact

SEQ ID NO: 17497 - DNA, 23 bp, Artificial Sequence
  Synthetic
ccgttttttttttttcaacacca

SEQ ID NO: 17498 - DNA, 23 bp, Artificial Sequence
  Synthetic
ccgttttttttttttccgctgtc

SEQ ID NO: 17499 - DNA, 23 bp, Artificial Sequence
  Synthetic
ccgttttttttttttatgtgcgt

SEQ ID NO: 17500 - DNA, 23 bp, Artificial Sequence
  Synthetic
ccgttttttttttttccatgact

SEQ ID NO: 17501 - DNA, 23 bp, Artificial Sequence
  Synthetic
ccgttttttttttttcctgtctg

SEQ ID NO: 17502 - DNA, 23 bp, Artificial Sequence
  Synthetic
ccgttttttttttttcagttgcc

SEQ ID NO: 17503 - DNA, 23 bp, Artificial Sequence
  Synthetic
ccgttttttttttttcagttgcc

SEQ ID NO: 17504 - DNA, 23 bp, Artificial Sequence
  Synthetic
ccgttttttttttttaatcagtt

SEQ ID NO: 17505 - DNA, 23 bp, Artificial Sequence
  Synthetic
ccgttttttttttttcatggtta

SEQ ID NO: 17506 - DNA, 23 bp, Artificial Sequence
  Synthetic
ccgttttttttttttatggttag

SEQ ID NO: 17507 - DNA, 23 bp, Artificial Sequence
  Synthetic
ccgttttttttttttgaattgcg

SEQ ID NO: 17508 - DNA, 23 bp, Artificial Sequence
  Synthetic
ccgttttttttttttgtgtccga

SEQ ID NO: 17509 - DNA, 23 bp, Artificial Sequence
  Synthetic
ccgttttttttttttaacccagc

SEQ ID NO: 17510 - DNA, 23 bp, Artificial Sequence
  Synthetic
ccgttttttttttttgacccagt

SEQ ID NO: 17511 - DNA, 23 bp, Artificial Sequence
  Synthetic
ccgttttttttttttggtatttg

SEQ ID NO: 17512 - DNA, 23 bp, Artificial Sequence
  Synthetic
ccgttttttttttttagttcttc

SEQ ID NO: 17513 - DNA, 23 bp, Artificial Sequence
  Synthetic
ccgttttttttttttagctcttc

SEQ ID NO: 17514 - DNA, 23 bp, Artificial Sequence
  Synthetic
ccgttttttttttttaaatccct

SEQ ID NO: 17515 - DNA, 23 bp, Artificial Sequence
  Synthetic
ccgttttttttttttaatccctg

SEQ ID NO: 17516 - DNA, 23 bp, Artificial Sequence
  Synthetic
ccgttttttttttttcctgctga

SEQ ID NO: 17517 - DNA, 23 bp, Artificial Sequence
  Synthetic
ccgttttttttttttgaccgaga

SEQ ID NO: 17518 - DNA, 23 bp, Artificial Sequence
  Synthetic
ccgttttttttttttcctatcct

SEQ ID NO: 17519 - DNA, 23 bp, Artificial Sequence
  Synthetic
ccgttttttttttttcctatcct

SEQ ID NO: 17520 - DNA, 23 bp, Artificial Sequence
  Synthetic
ccgttttttttttttcggaactt

SEQ ID NO: 17521 - DNA, 23 bp, Artificial Sequence
  Synthetic
ccgttttttttttttagaactta

SEQ ID NO: 17522 - DNA, 23 bp, Artificial Sequence
  Synthetic
ccgttttttttttttagaactta

SEQ ID NO: 17523 - DNA, 23 bp, Artificial Sequence
  Synthetic
ccgttttttttttttgttcacaa

SEQ ID NO: 17524 - DNA, 23 bp, Artificial Sequence
  Synthetic
ccgttttttttttttagaactta

SEQ ID NO: 17525 - DNA, 23 bp, Artificial Sequence
  Synthetic
ccgttttttttttttctgaactt

SEQ ID NO: 17526 - DNA, 23 bp, Artificial Sequence
  Synthetic
ccgttttttttttttccgatttc

SEQ ID NO: 17527 - DNA, 23 bp, Artificial Sequence
  Synthetic
ccgttttttttttttactgattt

SEQ ID NO: 17528 - DNA, 23 bp, Artificial Sequence
  Synthetic
ccgttttttttttttacaatact

SEQ ID NO: 17529 - DNA, 23 bp, Artificial Sequence
  Synthetic
ccgttttttttttttatgacaat

SEQ ID NO: 17530 - DNA, 23 bp, Artificial Sequence
  Synthetic
ccgttttttttttttgacaatac

SEQ ID NO: 17531 - DNA, 23 bp, Artificial Sequence
  Synthetic
ccgttttttttttttcagtcggg

SEQ ID NO: 17532 - DNA, 23 bp, Artificial Sequence
  Synthetic
ccgttttttttttttctgagtgt

SEQ ID NO: 17533 - DNA, 23 bp, Artificial Sequence
  Synthetic
ccgttttttttttttagagtgta

SEQ ID NO: 17534 - DNA, 23 bp, Artificial Sequence
  Synthetic
ccgttttttttttttcagtcggg

SEQ ID NO: 17535 - DNA, 23 bp, Artificial Sequence
  Synthetic
ccgttttttttttttcagtcaag

SEQ ID NO: 17536 - DNA, 23 bp, Artificial Sequence
  Synthetic
ccgttttttttttttgcaaacat

SEQ ID NO: 17537 - DNA, 23 bp, Artificial Sequence
  Synthetic
ccgttttttttttttgctatgcc

SEQ ID NO: 17538 - DNA, 23 bp, Artificial Sequence
  Synthetic
ccgttttttttttttacaaaatc

SEQ ID NO: 17539 - DNA, 23 bp, Artificial Sequence
  Synthetic
ccgttttttttttttaaccagct

SEQ ID NO: 17540 - DNA, 23 bp, Artificial Sequence
  Synthetic
ccgttttttttttttatcagcta

SEQ ID NO: 17541 - DNA, 23 bp, Artificial Sequence
  Synthetic
ccgttttttttttttatcaacta

SEQ ID NO: 17542 - DNA, 23 bp, Artificial Sequence
  Synthetic
ccgttttttttttttagatggat

SEQ ID NO: 17543 - DNA, 23 bp, Artificial Sequence
  Synthetic
ccgttttttttttttaggatttt

SEQ ID NO: 17544 - DNA, 23 bp, Artificial Sequence
  Synthetic
ccgttttttttttttcgcgagcc

SEQ ID NO: 17545 - DNA, 23 bp, Artificial Sequence
  Synthetic
ccgttttttttttttggcattac

SEQ ID NO: 17546 - DNA, 23 bp, Artificial Sequence
  Synthetic
ccgttttttttttttccccaaca

SEQ ID NO: 17547 - DNA, 23 bp, Artificial Sequence
  Synthetic
ccgttttttttttttccccaact

SEQ ID NO: 17548 - DNA, 23 bp, Artificial Sequence
  Synthetic
ccgttttttttttttccccaaag

SEQ ID NO: 17549 - DNA, 23 bp, Artificial Sequence
  Synthetic
ccgttttttttttttcgccaaca

SEQ ID NO: 17550 - DNA, 23 bp, Artificial Sequence
  Synthetic
ccgttttttttttttcccaattt

SEQ ID NO: 17551 - DNA, 23 bp, Artificial Sequence
  Synthetic
ccgttttttttttttctcagtaa

SEQ ID NO: 17552 - DNA, 23 bp, Artificial Sequence
  Synthetic
ccgttttttttttttctattagc

SEQ ID NO: 17553 - DNA, 23 bp, Artificial Sequence
  Synthetic
ccgttttttttttttctataagc

SEQ ID NO: 17554 - DNA, 23 bp, Artificial Sequence
  Synthetic
ccgttttttttttttatgtagtc

SEQ ID NO: 17555 - DNA, 23 bp, Artificial Sequence
  Synthetic
ccgttttttttttttcaaccatc

SEQ ID NO: 17556 - DNA, 23 bp, Artificial Sequence
  Synthetic
ccgttttttttttttcaatattg

SEQ ID NO: 17557 - DNA, 23 bp, Artificial Sequence
  Synthetic
ccgttttttttttttcagtattt

SEQ ID NO: 17558 - DNA, 23 bp, Artificial Sequence
  Synthetic
ccgttttttttttttagtaccat

SEQ ID NO: 17559 - DNA, 23 bp, Artificial Sequence
  Synthetic
ccgttttttttttttggatgaat

SEQ ID NO: 17560 - DNA, 23 bp, Artificial Sequence
  Synthetic
ccgttttttttttttccagtaac

SEQ ID NO: 17561 - DNA, 23 bp, Artificial Sequence
  Synthetic
ccgttttttttttttccacattg

SEQ ID NO: 17562 - DNA, 23 bp, Artificial Sequence
  Synthetic
ccgttttttttttttcacagtgt

SEQ ID NO: 17563 - DNA, 23 bp, Artificial Sequence
  Synthetic
ccgttttttttttttcatttagc

SEQ ID NO: 17564 - DNA, 23 bp, Artificial Sequence
  Synthetic
ccgttttttttttttctgcatta

SEQ ID NO: 17565 - DNA, 23 bp, Artificial Sequence
  Synthetic
ccgttttttttttttagccgtac

SEQ ID NO: 17566 - DNA, 23 bp, Artificial Sequence
  Synthetic
ccgttttttttttttacatcact

SEQ ID NO: 17567 - DNA, 23 bp, Artificial Sequence
  Synthetic
ccgttttttttttttctgaaacg

SEQ ID NO: 17568 - DNA, 23 bp, Artificial Sequence
  Synthetic
ccgttttttttttttcacagatt

SEQ ID NO: 17569 - DNA, 23 bp, Artificial Sequence
  Synthetic
ccgttttttttttttagtaacat

SEQ ID NO: 17570 - DNA, 23 bp, Artificial Sequence
  Synthetic
ccgttttttttttttcagtcgca

SEQ ID NO: 17571 - DNA, 23 bp, Artificial Sequence
  Synthetic
ccgttttttttttttactagaaa

SEQ ID NO: 17572 - DNA, 23 bp, Artificial Sequence
  Synthetic
ccgttttttttttttgagttctg

SEQ ID NO: 17573 - DNA, 23 bp, Artificial Sequence
  Synthetic
ccgttttttttttttgtcttcaa

SEQ ID NO: 17574 - DNA, 23 bp, Artificial Sequence
  Synthetic
ccgttttttttttttgggaggaa

SEQ ID NO: 17575 - DNA, 23 bp, Artificial Sequence
  Synthetic
ccgttttttttttttaaacgtag

SEQ ID NO: 17576 - DNA, 23 bp, Artificial Sequence
  Synthetic
ccgttttttttttttcccaggtc

SEQ ID NO: 17577 - DNA, 23 bp, Artificial Sequence
  Synthetic
ccgttttttttttttacacagca

SEQ ID NO: 17578 - DNA, 23 bp, Artificial Sequence
  Synthetic
ccgttttttttttttatccggga

SEQ ID NO: 17579 - DNA, 23 bp, Artificial Sequence
  Synthetic
ccgttttttttttttcgagagtt

SEQ ID NO: 17580 - DNA, 23 bp, Artificial Sequence
  Synthetic
ccgttttttttttttccactgag

SEQ ID NO: 17581 - DNA, 23 bp, Artificial Sequence
  Synthetic
ccgttttttttttttgtacgatt

SEQ ID NO: 17582 - DNA, 23 bp, Artificial Sequence
  Synthetic
ccgttttttttttttaagtttag

SEQ ID NO: 17583 - DNA, 23 bp, Artificial Sequence
  Synthetic
ccgttttttttttttaacttttt

SEQ ID NO: 17584 - DNA, 23 bp, Artificial Sequence
  Synthetic
ccgttttttttttttaggttttg

SEQ ID NO: 17585 - DNA, 23 bp, Artificial Sequence
  Synthetic
ccgttttttttttttggtcccga

SEQ ID NO: 17586 - DNA, 23 bp, Artificial Sequence
  Synthetic
ccgttttttttttttcccttctc

SEQ ID NO: 17587 - DNA, 23 bp, Artificial Sequence
  Synthetic
ccgttttttttttttgtaccata

SEQ ID NO: 17588 - DNA, 23 bp, Artificial Sequence
  Synthetic
ccgttttttttttttaacaaaat

SEQ ID NO: 17589 - DNA, 23 bp, Artificial Sequence
  Synthetic
ccgttttttttttttcaaaatca

SEQ ID NO: 17590 - DNA, 23 bp, Artificial Sequence
  Synthetic
ccgttttttttttttacagctag

SEQ ID NO: 17591 - DNA, 23 bp, Artificial Sequence
  Synthetic
ccgttttttttttttcggttatc

SEQ ID NO: 17592 - DNA, 23 bp, Artificial Sequence
  Synthetic
ccgttttttttttttaggccggg

SEQ ID NO: 17593 - DNA, 23 bp, Artificial Sequence
  Synthetic
ccgttttttttttttaggccggg

SEQ ID NO: 17594 - DNA, 23 bp, Artificial Sequence
  Synthetic
ccgttttttttttttctgcacaa

SEQ ID NO: 17595 - DNA, 23 bp, Artificial Sequence
  Synthetic
ccgttttttttttttcaaaaatg

SEQ ID NO: 17596 - DNA, 23 bp, Artificial Sequence
  Synthetic
ccgttttttttttttcaagatcg

SEQ ID NO: 17597 - DNA, 23 bp, Artificial Sequence
  Synthetic
ccgttttttttttttacatagtg

SEQ ID NO: 17598 - DNA, 23 bp, Artificial Sequence
  Synthetic
ccgttttttttttttagcacgtc

SEQ ID NO: 17599 - DNA, 23 bp, Artificial Sequence
  Synthetic
ccgttttttttttttagccaact

SEQ ID NO: 17600 - DNA, 23 bp, Artificial Sequence
  Synthetic
ccgttttttttttttcagtcagc

SEQ ID NO: 17601 - DNA, 23 bp, Artificial Sequence
  Synthetic
ccgttttttttttttaactagcg

SEQ ID NO: 17602 - DNA, 23 bp, Artificial Sequence
  Synthetic
ccgttttttttttttaccacacc

SEQ ID NO: 17603 - DNA, 23 bp, Artificial Sequence
  Synthetic
ccgttttttttttttgccgtccc

SEQ ID NO: 17604 - DNA, 23 bp, Artificial Sequence
  Synthetic
ccgttttttttttttcctactac

SEQ ID NO: 17605 - DNA, 23 bp, Artificial Sequence
  Synthetic
ccgttttttttttttaatcggca

SEQ ID NO: 17606 - DNA, 23 bp, Artificial Sequence
  Synthetic
ccgttttttttttttcaaggaaa

SEQ ID NO: 17607 - DNA, 23 bp, Artificial Sequence
  Synthetic
ccgttttttttttttagagcaca

SEQ ID NO: 17608 - DNA, 23 bp, Artificial Sequence
  Synthetic
ccgttttttttttttggggacac

SEQ ID NO: 17609 - DNA, 23 bp, Artificial Sequence
  Synthetic
ccgttttttttttttgtatgcct

SEQ ID NO: 17610 - DNA, 23 bp, Artificial Sequence
  Synthetic
ccgttttttttttttataggaag

SEQ ID NO: 17611 - DNA, 23 bp, Artificial Sequence
  Synthetic
ccgttttttttttttattcccaa

SEQ ID NO: 17612 - DNA, 23 bp, Artificial Sequence
  Synthetic
ccgttttttttttttaagggcga

SEQ ID NO: 17613 - DNA, 23 bp, Artificial Sequence
  Synthetic
ccgttttttttttttaacaggct

SEQ ID NO: 17614 - DNA, 23 bp, Artificial Sequence
  Synthetic
ccgttttttttttttaatgaaga

SEQ ID NO: 17615 - DNA, 23 bp, Artificial Sequence
  Synthetic
ccgttttttttttttacctggtg

SEQ ID NO: 17616 - DNA, 23 bp, Artificial Sequence
  Synthetic
ccgttttttttttttcacaacac

SEQ ID NO: 17617 - DNA, 23 bp, Artificial Sequence
  Synthetic
ccgttttttttttttcacaccag

SEQ ID NO: 17618 - DNA, 23 bp, Artificial Sequence
  Synthetic
ccgttttttttttttatgggcag

SEQ ID NO: 17619 - DNA, 23 bp, Artificial Sequence
  Synthetic
ccgttttttttttttaggctagt

SEQ ID NO: 17620 - DNA, 23 bp, Artificial Sequence
  Synthetic
ccgttttttttttttgcctatgg

SEQ ID NO: 17621 - DNA, 23 bp, Artificial Sequence
  Synthetic
ccgttttttttttttctggacac

SEQ ID NO: 17622 - DNA, 23 bp, Artificial Sequence
  Synthetic
ccgttttttttttttcgacccca

SEQ ID NO: 17623 - DNA, 23 bp, Artificial Sequence
  Synthetic
ccgttttttttttttacaatcta

SEQ ID NO: 17624 - DNA, 23 bp, Artificial Sequence
  Synthetic
ccgttttttttttttcgggaccc

SEQ ID NO: 17625 - DNA, 23 bp, Artificial Sequence
  Synthetic
ccgttttttttttttctccgggg

SEQ ID NO: 17626 - DNA, 23 bp, Artificial Sequence
  Synthetic
ccgttttttttttttatttctgc

SEQ ID NO: 17627 - DNA, 23 bp, Artificial Sequence
  Synthetic
ccgttttttttttttatctgctg

SEQ ID NO: 17628 - DNA, 23 bp, Artificial Sequence
  Synthetic
ccgttttttttttttgcttacac

SEQ ID NO: 17629 - DNA, 23 bp, Artificial Sequence
  Synthetic
ccgttttttttttttctatacaa

SEQ ID NO: 17630 - DNA, 23 bp, Artificial Sequence
  Synthetic
ccgttttttttttttccacacaa

SEQ ID NO: 17631 - DNA, 23 bp, Artificial Sequence
  Synthetic
ccgttttttttttttccatacaa

SEQ ID NO: 17632 - DNA, 23 bp, Artificial Sequence
  Synthetic
ccgttttttttttttctattcaa

SEQ ID NO: 17633 - DNA, 23 bp, Artificial Sequence
  Synthetic
ccgttttttttttttctatacaa

SEQ ID NO: 17634 - DNA, 23 bp, Artificial Sequence
  Synthetic
ccgttttttttttttcaacacaa

SEQ ID NO: 17635 - DNA, 23 bp, Artificial Sequence
  Synthetic
ccgttttttttttttcagcacaa

SEQ ID NO: 17636 - DNA, 23 bp, Artificial Sequence
  Synthetic
ccgttttttttttttctgtacaa

SEQ ID NO: 17637 - DNA, 23 bp, Artificial Sequence
  Synthetic
ccgttttttttttttcatacttc

SEQ ID NO: 17638 - DNA, 23 bp, Artificial Sequence
  Synthetic
ccgttttttttttttcaagttcg

SEQ ID NO: 17639 - DNA, 23 bp, Artificial Sequence
  Synthetic
ccgttttttttttttagttatca

SEQ ID NO: 17640 - DNA, 23 bp, Artificial Sequence
  Synthetic
ccgttttttttttttagttatca

SEQ ID NO: 17641 - DNA, 23 bp, Artificial Sequence
  Synthetic
ccgttttttttttttagccctgt

SEQ ID NO: 17642 - DNA, 23 bp, Artificial Sequence
  Synthetic
ccgttttttttttttagccctgt

SEQ ID NO: 17643 - DNA, 23 bp, Artificial Sequence
  Synthetic
ccgttttttttttttcaaattcg

SEQ ID NO: 17644 - DNA, 23 bp, Artificial Sequence
  Synthetic
ccgttttttttttttaaatccgg

SEQ ID NO: 17645 - DNA, 23 bp, Artificial Sequence
  Synthetic
ccgttttttttttttcacacatt

SEQ ID NO: 17646 - DNA, 23 bp, Artificial Sequence
  Synthetic
ccgttttttttttttaacaccat

SEQ ID NO: 17647 - DNA, 23 bp, Artificial Sequence
  Synthetic
ccgttttttttttttcattcacc

SEQ ID NO: 17648 - DNA, 23 bp, Artificial Sequence
  Synthetic
ccgttttttttttttcaggttaa

SEQ ID NO: 17649 - DNA, 23 bp, Artificial Sequence
  Synthetic
ccgttttttttttttcaagttag

SEQ ID NO: 17650 - DNA, 23 bp, Artificial Sequence
  Synthetic
ccgttttttttttttattattac

SEQ ID NO: 17651 - DNA, 23 bp, Artificial Sequence
  Synthetic
ccgttttttttttttaagagacc

SEQ ID NO: 17652 - DNA, 23 bp, Artificial Sequence
  Synthetic
ccgttttttttttttcaagccca

SEQ ID NO: 17653 - DNA, 23 bp, Artificial Sequence
  Synthetic
ccgttttttttttttccctttta

SEQ ID NO: 17654 - DNA, 23 bp, Artificial Sequence
  Synthetic
ccgttttttttttttaccatggc

SEQ ID NO: 17655 - DNA, 23 bp, Artificial Sequence
  Synthetic
ccgttttttttttttgctggttg

SEQ ID NO: 17656 - DNA, 23 bp, Artificial Sequence
  Synthetic
ccgttttttttttttcataggaa

SEQ ID NO: 17657 - DNA, 23 bp, Artificial Sequence
  Synthetic
ccgttttttttttttgataggaa

SEQ ID NO: 17658 - DNA, 23 bp, Artificial Sequence
  Synthetic
ccgttttttttttttgcgtattc

SEQ ID NO: 17659 - DNA, 23 bp, Artificial Sequence
  Synthetic
ccgttttttttttttcctgattc

SEQ ID NO: 17660 - DNA, 23 bp, Artificial Sequence
  Synthetic
ccgttttttttttttccataggg

SEQ ID NO: 17661 - DNA, 23 bp, Artificial Sequence
  Synthetic
ccgttttttttttttagtgcttt

SEQ ID NO: 17662 - DNA, 23 bp, Artificial Sequence
  Synthetic
ccgttttttttttttagtgcttt

SEQ ID NO: 17663 - DNA, 23 bp, Artificial Sequence
  Synthetic
ccgttttttttttttacatcatc

SEQ ID NO: 17664 - DNA, 23 bp, Artificial Sequence
  Synthetic
ccgttttttttttttaaagttct

SEQ ID NO: 17665 - DNA, 23 bp, Artificial Sequence
  Synthetic
ccgttttttttttttaaagttct

SEQ ID NO: 17666 - DNA, 23 bp, Artificial Sequence
  Synthetic
ccgttttttttttttcacttttg

SEQ ID NO: 17667 - DNA, 23 bp, Artificial Sequence
  Synthetic
ccgttttttttttttcatttttg

SEQ ID NO: 17668 - DNA, 23 bp, Artificial Sequence
  Synthetic
ccgttttttttttttcaaaccat

SEQ ID NO: 17669 - DNA, 23 bp, Artificial Sequence
  Synthetic
ccgttttttttttttaaaccatg

SEQ ID NO: 17670 - DNA, 23 bp, Artificial Sequence
  Synthetic
ccgttttttttttttcaatattt

SEQ ID NO: 17671 - DNA, 23 bp, Artificial Sequence
  Synthetic
ccgttttttttttttctgcactg

SEQ ID NO: 17672 - DNA, 23 bp, Artificial Sequence
  Synthetic
ccgttttttttttttgcactaga

SEQ ID NO: 17673 - DNA, 23 bp, Artificial Sequence
  Synthetic
ccgttttttttttttcaccgaca

SEQ ID NO: 17674 - DNA, 23 bp, Artificial Sequence
  Synthetic
ccgttttttttttttacaatcaa

SEQ ID NO: 17675 - DNA, 23 bp, Artificial Sequence
  Synthetic
ccgttttttttttttcaccgaca

SEQ ID NO: 17676 - DNA, 23 bp, Artificial Sequence
  Synthetic
ccgttttttttttttggcaagtc

SEQ ID NO: 17677 - DNA, 23 bp, Artificial Sequence
  Synthetic
ccgttttttttttttgtgaattc

SEQ ID NO: 17678 - DNA, 23 bp, Artificial Sequence
  Synthetic
ccgttttttttttttcttatcag

SEQ ID NO: 17679 - DNA, 23 bp, Artificial Sequence
  Synthetic
ccgttttttttttttctgcaaca

SEQ ID NO: 17680 - DNA, 23 bp, Artificial Sequence
  Synthetic
ccgttttttttttttgataccag

SEQ ID NO: 17681 - DNA, 23 bp, Artificial Sequence
  Synthetic
ccgttttttttttttctaatata

SEQ ID NO: 17682 - DNA, 23 bp, Artificial Sequence
  Synthetic
ccgttttttttttttctgtcaat

SEQ ID NO: 17683 - DNA, 23 bp, Artificial Sequence
  Synthetic
ccgttttttttttttgggacttt

SEQ ID NO: 17684 - DNA, 23 bp, Artificial Sequence
  Synthetic
ccgttttttttttttacatggag

SEQ ID NO: 17685 - DNA, 23 bp, Artificial Sequence
  Synthetic
ccgttttttttttttcaacaaca

SEQ ID NO: 17686 - DNA, 23 bp, Artificial Sequence
  Synthetic
ccgttttttttttttcaacaact

SEQ ID NO: 17687 - DNA, 23 bp, Artificial Sequence
  Synthetic
ccgttttttttttttacaggtag

SEQ ID NO: 17688 - DNA, 23 bp, Artificial Sequence
  Synthetic
ccgttttttttttttgttttgca

SEQ ID NO: 17689 - DNA, 23 bp, Artificial Sequence
  Synthetic
ccgttttttttttttgttttgca

SEQ ID NO: 17690 - DNA, 23 bp, Artificial Sequence
  Synthetic
ccgttttttttttttcctgcact

SEQ ID NO: 17691 - DNA, 23 bp, Artificial Sequence
  Synthetic
ccgttttttttttttatcgttac

SEQ ID NO: 17692 - DNA, 23 bp, Artificial Sequence
  Synthetic
ccgttttttttttttcattacca

SEQ ID NO: 17693 - DNA, 23 bp, Artificial Sequence
  Synthetic
ccgttttttttttttcatgccct

SEQ ID NO: 17694 - DNA, 23 bp, Artificial Sequence
  Synthetic
ccgttttttttttttagtggtcc

SEQ ID NO: 17695 - DNA, 23 bp, Artificial Sequence
  Synthetic
ccgttttttttttttgcatagga

SEQ ID NO: 17696 - DNA, 23 bp, Artificial Sequence
  Synthetic
ccgttttttttttttgactccgg

SEQ ID NO: 17697 - DNA, 23 bp, Artificial Sequence
  Synthetic
ccgttttttttttttcaacacca

SEQ ID NO: 17698 - DNA, 23 bp, Artificial Sequence
  Synthetic
ccgttttttttttttccgctgtc

SEQ ID NO: 17699 - DNA, 23 bp, Artificial Sequence
  Synthetic
ccgttttttttttttccatgact

SEQ ID NO: 17700 - DNA, 23 bp, Artificial Sequence
  Synthetic
ccgttttttttttttcctgtctg

SEQ ID NO: 17701 - DNA, 23 bp, Artificial Sequence
  Synthetic
ccgttttttttttttcagttgcc

SEQ ID NO: 17702 - DNA, 23 bp, Artificial Sequence
  Synthetic
ccgttttttttttttcagttgcc

SEQ ID NO: 17703 - DNA, 23 bp, Artificial Sequence
  Synthetic
ccgttttttttttttaatcagtt

SEQ ID NO: 17704 - DNA, 23 bp, Artificial Sequence
  Synthetic
ccgttttttttttttcatggtta

SEQ ID NO: 17705 - DNA, 23 bp, Artificial Sequence
  Synthetic
ccgttttttttttttatggttag

SEQ ID NO: 17706 - DNA, 23 bp, Artificial Sequence
  Synthetic
ccgttttttttttttgaattgcg

SEQ ID NO: 17707 - DNA, 23 bp, Artificial Sequence
  Synthetic
ccgttttttttttttaacccagc

SEQ ID NO: 17708 - DNA, 23 bp, Artificial Sequence
  Synthetic
ccgttttttttttttgacccagt

SEQ ID NO: 17709 - DNA, 23 bp, Artificial Sequence
  Synthetic
ccgttttttttttttggtatttg

SEQ ID NO: 17710 - DNA, 23 bp, Artificial Sequence
  Synthetic
ccgttttttttttttagttcttc

SEQ ID NO: 17711 - DNA, 23 bp, Artificial Sequence
  Synthetic
ccgttttttttttttagctcttc

SEQ ID NO: 17712 - DNA, 23 bp, Artificial Sequence
  Synthetic
ccgttttttttttttaaatccct

SEQ ID NO: 17713 - DNA, 23 bp, Artificial Sequence
  Synthetic
ccgttttttttttttaatccctg

SEQ ID NO: 17714 - DNA, 23 bp, Artificial Sequence
  Synthetic
ccgttttttttttttcctgctga

SEQ ID NO: 17715 - DNA, 23 bp, Artificial Sequence
  Synthetic
ccgttttttttttttgaccgaga

SEQ ID NO: 17716 - DNA, 23 bp, Artificial Sequence
  Synthetic
ccgttttttttttttcctatcct

SEQ ID NO: 17717 - DNA, 23 bp, Artificial Sequence
  Synthetic
ccgttttttttttttagaactta

SEQ ID NO: 17718 - DNA, 23 bp, Artificial Sequence
  Synthetic
ccgttttttttttttagaactta

SEQ ID NO: 17719 - DNA, 23 bp, Artificial Sequence
  Synthetic
ccgttttttttttttctgaactt

SEQ ID NO: 17720 - DNA, 23 bp, Artificial Sequence
  Synthetic
ccgttttttttttttccgatttc

SEQ ID NO: 17721 - DNA, 23 bp, Artificial Sequence
  Synthetic
ccgttttttttttttactgattt

SEQ ID NO: 17722 - DNA, 23 bp, Artificial Sequence
  Synthetic
ccgttttttttttttgacaatac

SEQ ID NO: 17723 - DNA, 23 bp, Artificial Sequence
  Synthetic
ccgttttttttttttctgagtgt

SEQ ID NO: 17724 - DNA, 23 bp, Artificial Sequence
  Synthetic
ccgttttttttttttgagagtgt

SEQ ID NO: 17725 - DNA, 23 bp, Artificial Sequence
  Synthetic
ccgttttttttttttcagtcggg

SEQ ID NO: 17726 - DNA, 23 bp, Artificial Sequence
  Synthetic
ccgttttttttttttacaaaatc

SEQ ID NO: 17727 - DNA, 23 bp, Artificial Sequence
  Synthetic
ccgttttttttttttaggatttt

SEQ ID NO: 17728 - DNA, 23 bp, Artificial Sequence
  Synthetic
ccgttttttttttttcgcgagcc

SEQ ID NO: 17729 - DNA, 23 bp, Artificial Sequence
  Synthetic
ccgttttttttttttggcattac

SEQ ID NO: 17730 - DNA, 23 bp, Artificial Sequence
  Synthetic
ccgttttttttttttatgtagtc

SEQ ID NO: 17731 - DNA, 23 bp, Artificial Sequence
  Synthetic
ccgttttttttttttagtaccat

SEQ ID NO: 17732 - DNA, 23 bp, Artificial Sequence
  Synthetic
ccgttttttttttttccacattg

SEQ ID NO: 17733 - DNA, 23 bp, Artificial Sequence
  Synthetic
ccgttttttttttttagccgtac

SEQ ID NO: 17734 - DNA, 23 bp, Artificial Sequence
  Synthetic
ccgttttttttttttcaaaatca

SEQ ID NO: 17735 - DNA, 23 bp, Artificial Sequence
  Synthetic
ccgttttttttttttacagctag

SEQ ID NO: 17736 - DNA, 23 bp, Artificial Sequence
  Synthetic
ccgttttttttttttaggccggg

SEQ ID NO: 17737 - DNA, 23 bp, Artificial Sequence
  Synthetic
ccgttttttttttttcaaaaatg

SEQ ID NO: 17738 - DNA, 23 bp, Artificial Sequence
  Synthetic
ccgttttttttttttctatacaa

SEQ ID NO: 17739 - DNA, 23 bp, Artificial Sequence
  Synthetic
ccgttttttttttttccacacaa

SEQ ID NO: 17740 - DNA, 23 bp, Artificial Sequence
  Synthetic
ccgttttttttttttccatacaa

SEQ ID NO: 17741 - DNA, 23 bp, Artificial Sequence
  Synthetic
ccgttttttttttttatgcaacc

SEQ ID NO: 17742 - DNA, 23 bp, Artificial Sequence
  Synthetic
ccgttttttttttttctatacaa

SEQ ID NO: 17743 - DNA, 23 bp, Artificial Sequence
  Synthetic
ccgttttttttttttgtacaaac

SEQ ID NO: 17744 - DNA, 23 bp, Artificial Sequence
  Synthetic
ccgttttttttttttagcacaaa

SEQ ID NO: 17745 - DNA, 23 bp, Artificial Sequence
  Synthetic
ccgttttttttttttctatacaa

SEQ ID NO: 17746 - DNA, 23 bp, Artificial Sequence
  Synthetic
ccgttttttttttttctattcaa

SEQ ID NO: 17747 - DNA, 23 bp, Artificial Sequence
  Synthetic
ccgttttttttttttcaagttcg

SEQ ID NO: 17748 - DNA, 23 bp, Artificial Sequence
  Synthetic
ccgttttttttttttagttatca

SEQ ID NO: 17749 - DNA, 23 bp, Artificial Sequence
  Synthetic
ccgttttttttttttagccctgt

SEQ ID NO: 17750 - DNA, 23 bp, Artificial Sequence
  Synthetic
ccgttttttttttttctgcactg

SEQ ID NO: 17751 - DNA, 23 bp, Artificial Sequence
  Synthetic
ccgttttttttttttagccctgt

SEQ ID NO: 17752 - DNA, 23 bp, Artificial Sequence
  Synthetic
ccgttttttttttttaaattcgg

SEQ ID NO: 17753 - DNA, 23 bp, Artificial Sequence
  Synthetic
ccgttttttttttttaaacacca

SEQ ID NO: 17754 - DNA, 23 bp, Artificial Sequence
  Synthetic
ccgttttttttttttcattcacc

SEQ ID NO: 17755 - DNA, 23 bp, Artificial Sequence
  Synthetic
ccgttttttttttttcattcact

SEQ ID NO: 17756 - DNA, 23 bp, Artificial Sequence
  Synthetic
ccgttttttttttttcaagttag

SEQ ID NO: 17757 - DNA, 23 bp, Artificial Sequence
  Synthetic
ccgttttttttttttgcattatt

SEQ ID NO: 17758 - DNA, 23 bp, Artificial Sequence
  Synthetic
ccgttttttttttttcgtaccaa

SEQ ID NO: 17759 - DNA, 23 bp, Artificial Sequence
  Synthetic
ccgttttttttttttagagaccg

SEQ ID NO: 17760 - DNA, 23 bp, Artificial Sequence
  Synthetic
ccgttttttttttttccctttta

SEQ ID NO: 17761 - DNA, 23 bp, Artificial Sequence
  Synthetic
ccgttttttttttttgccctttc

SEQ ID NO: 17762 - DNA, 23 bp, Artificial Sequence
  Synthetic
ccgttttttttttttagctggtt

SEQ ID NO: 17763 - DNA, 23 bp, Artificial Sequence
  Synthetic
ccgttttttttttttctggttga

SEQ ID NO: 17764 - DNA, 23 bp, Artificial Sequence
  Synthetic
ccgttttttttttttagctggtt

SEQ ID NO: 17765 - DNA, 23 bp, Artificial Sequence
  Synthetic
ccgttttttttttttcataggaa

SEQ ID NO: 17766 - DNA, 23 bp, Artificial Sequence
  Synthetic
ccgttttttttttttcgcgtatt

SEQ ID NO: 17767 - DNA, 23 bp, Artificial Sequence
  Synthetic
ccgttttttttttttcacaacac

SEQ ID NO: 17768 - DNA, 23 bp, Artificial Sequence
  Synthetic
ccgttttttttttttccataggg

SEQ ID NO: 17769 - DNA, 23 bp, Artificial Sequence
  Synthetic
ccgttttttttttttcgtggttc

SEQ ID NO: 17770 - DNA, 23 bp, Artificial Sequence
  Synthetic
ccgttttttttttttataaagta

SEQ ID NO: 17771 - DNA, 23 bp, Artificial Sequence
  Synthetic
ccgttttttttttttgtgctttc

SEQ ID NO: 17772 - DNA, 23 bp, Artificial Sequence
  Synthetic
ccgttttttttttttgtacatca

SEQ ID NO: 17773 - DNA, 23 bp, Artificial Sequence
  Synthetic
ccgttttttttttttcccatgga

SEQ ID NO: 17774 - DNA, 23 bp, Artificial Sequence
  Synthetic
ccgttttttttttttcctatgga

SEQ ID NO: 17775 - DNA, 23 bp, Artificial Sequence
  Synthetic
ccgttttttttttttagaactga

SEQ ID NO: 17776 - DNA, 23 bp, Artificial Sequence
  Synthetic
ccgttttttttttttagaagcat

SEQ ID NO: 17777 - DNA, 23 bp, Artificial Sequence
  Synthetic
ccgttttttttttttaaagttct

SEQ ID NO: 17778 - DNA, 23 bp, Artificial Sequence
  Synthetic
ccgttttttttttttcttttgtg

SEQ ID NO: 17779 - DNA, 23 bp, Artificial Sequence
  Synthetic
ccgttttttttttttcctatcac

SEQ ID NO: 17780 - DNA, 23 bp, Artificial Sequence
  Synthetic
ccgttttttttttttaaaccatt

SEQ ID NO: 17781 - DNA, 23 bp, Artificial Sequence
  Synthetic
ccgttttttttttttaaaccatg

SEQ ID NO: 17782 - DNA, 23 bp, Artificial Sequence
  Synthetic
ccgttttttttttttccaatatt

SEQ ID NO: 17783 - DNA, 23 bp, Artificial Sequence
  Synthetic
ccgttttttttttttaagtgcct

SEQ ID NO: 17784 - DNA, 23 bp, Artificial Sequence
  Synthetic
ccgttttttttttttacctgcac

SEQ ID NO: 17785 - DNA, 23 bp, Artificial Sequence
  Synthetic
ccgttttttttttttcaccgaca

SEQ ID NO: 17786 - DNA, 23 bp, Artificial Sequence
  Synthetic
ccgttttttttttttacaatcaa

SEQ ID NO: 17787 - DNA, 23 bp, Artificial Sequence
  Synthetic
ccgttttttttttttcaccgaca

SEQ ID NO: 17788 - DNA, 23 bp, Artificial Sequence
  Synthetic
ccgttttttttttttgtgaattc

SEQ ID NO: 17789 - DNA, 23 bp, Artificial Sequence
  Synthetic
ccgttttttttttttccttatca

SEQ ID NO: 17790 - DNA, 23 bp, Artificial Sequence
  Synthetic
ccgttttttttttttctgcaaca

SEQ ID NO: 17791 - DNA, 23 bp, Artificial Sequence
  Synthetic
ccgttttttttttttgcactaga

SEQ ID NO: 17792 - DNA, 23 bp, Artificial Sequence
  Synthetic
ccgttttttttttttctgcacta

SEQ ID NO: 17793 - DNA, 23 bp, Artificial Sequence
  Synthetic
ccgttttttttttttctaatata

SEQ ID NO: 17794 - DNA, 23 bp, Artificial Sequence
  Synthetic
ccgttttttttttttagcgggac

SEQ ID NO: 17795 - DNA, 23 bp, Artificial Sequence
  Synthetic
ccgttttttttttttacatggag

SEQ ID NO: 17796 - DNA, 23 bp, Artificial Sequence
  Synthetic
ccgttttttttttttaacaacat

SEQ ID NO: 17797 - DNA, 23 bp, Artificial Sequence
  Synthetic
ccgttttttttttttacaggtag

SEQ ID NO: 17798 - DNA, 23 bp, Artificial Sequence
  Synthetic
ccgttttttttttttaatgtgca

SEQ ID NO: 17799 - DNA, 23 bp, Artificial Sequence
  Synthetic
ccgttttttttttttgttttgca

SEQ ID NO: 17800 - DNA, 23 bp, Artificial Sequence
  Synthetic
ccgttttttttttttgttttgca

SEQ ID NO: 17801 - DNA, 23 bp, Artificial Sequence
  Synthetic
ccgttttttttttttatacttct

SEQ ID NO: 17802 - DNA, 23 bp, Artificial Sequence
  Synthetic
ccgttttttttttttatacttct

SEQ ID NO: 17803 - DNA, 23 bp, Artificial Sequence
  Synthetic
ccgttttttttttttatcgttac

SEQ ID NO: 17804 - DNA, 23 bp, Artificial Sequence
  Synthetic
ccgttttttttttttatcattac

SEQ ID NO: 17805 - DNA, 23 bp, Artificial Sequence
  Synthetic
ccgttttttttttttcatgctct

SEQ ID NO: 17806 - DNA, 23 bp, Artificial Sequence
  Synthetic
ccgttttttttttttagaagtat

SEQ ID NO: 17807 - DNA, 23 bp, Artificial Sequence
  Synthetic
ccgttttttttttttagtggtcc

SEQ ID NO: 17808 - DNA, 23 bp, Artificial Sequence
  Synthetic
ccgttttttttttttgcatagga

SEQ ID NO: 17809 - DNA, 23 bp, Artificial Sequence
  Synthetic
ccgttttttttttttgactccgg

SEQ ID NO: 17810 - DNA, 23 bp, Artificial Sequence
  Synthetic
ccgttttttttttttgattccgg

SEQ ID NO: 17811 - DNA, 23 bp, Artificial Sequence
  Synthetic
ccgttttttttttttacacactt

SEQ ID NO: 17812 - DNA, 23 bp, Artificial Sequence
  Synthetic
ccgttttttttttttcctgcact

SEQ ID NO: 17813 - DNA, 23 bp, Artificial Sequence
  Synthetic
ccgttttttttttttcctgcact

SEQ ID NO: 17814 - DNA, 23 bp, Artificial Sequence
  Synthetic
ccgttttttttttttacatcagt

SEQ ID NO: 17815 - DNA, 23 bp, Artificial Sequence
  Synthetic
ccgttttttttttttgcatagga

SEQ ID NO: 17816 - DNA, 23 bp, Artificial Sequence
  Synthetic
ccgttttttttttttgtcaattc

SEQ ID NO: 17817 - DNA, 23 bp, Artificial Sequence
  Synthetic
ccgttttttttttttcagttgcc

SEQ ID NO: 17818 - DNA, 23 bp, Artificial Sequence
  Synthetic
ccgttttttttttttcaatcagt

SEQ ID NO: 17819 - DNA, 23 bp, Artificial Sequence
  Synthetic
ccgttttttttttttatggttag

SEQ ID NO: 17820 - DNA, 23 bp, Artificial Sequence
  Synthetic
ccgttttttttttttaattgcgt

SEQ ID NO: 17821 - DNA, 23 bp, Artificial Sequence
  Synthetic
ccgttttttttttttaacccagc

SEQ ID NO: 17822 - DNA, 23 bp, Artificial Sequence
  Synthetic
ccgttttttttttttgacccagt

SEQ ID NO: 17823 - DNA, 23 bp, Artificial Sequence
  Synthetic
ccgttttttttttttgacccagt

SEQ ID NO: 17824 - DNA, 23 bp, Artificial Sequence
  Synthetic
ccgttttttttttttggtatttg

SEQ ID NO: 17825 - DNA, 23 bp, Artificial Sequence
  Synthetic
ccgttttttttttttaatccctg

SEQ ID NO: 17826 - DNA, 23 bp, Artificial Sequence
  Synthetic
ccgttttttttttttcctgctga

SEQ ID NO: 17827 - DNA, 23 bp, Artificial Sequence
  Synthetic
ccgttttttttttttctatcctg

SEQ ID NO: 17828 - DNA, 23 bp, Artificial Sequence
  Synthetic
ccgttttttttttttagaactta

SEQ ID NO: 17829 - DNA, 23 bp, Artificial Sequence
  Synthetic
ccgttttttttttttccgatttc

SEQ ID NO: 17830 - DNA, 23 bp, Artificial Sequence
  Synthetic
ccgttttttttttttcactgatt

SEQ ID NO: 17831 - DNA, 23 bp, Artificial Sequence
  Synthetic
ccgttttttttttttcgatttca

SEQ ID NO: 17832 - DNA, 23 bp, Artificial Sequence
  Synthetic
ccgttttttttttttctttgaca

SEQ ID NO: 17833 - DNA, 23 bp, Artificial Sequence
  Synthetic
ccgttttttttttttctaaaaca

SEQ ID NO: 17834 - DNA, 23 bp, Artificial Sequence
  Synthetic
ccgttttttttttttctaaaaca

SEQ ID NO: 17835 - DNA, 23 bp, Artificial Sequence
  Synthetic
ccgttttttttttttaaagcacc

SEQ ID NO: 17836 - DNA, 23 bp, Artificial Sequence
  Synthetic
ccgttttttttttttactgaaac

SEQ ID NO: 17837 - DNA, 23 bp, Artificial Sequence
  Synthetic
ccgttttttttttttgcaggtac

SEQ ID NO: 17838 - DNA, 23 bp, Artificial Sequence
  Synthetic
ccgttttttttttttactaaaac

SEQ ID NO: 17839 - DNA, 23 bp, Artificial Sequence
  Synthetic
ccgttttttttttttgcaaacat

SEQ ID NO: 17840 - DNA, 23 bp, Artificial Sequence
  Synthetic
ccgttttttttttttcagtcgag

SEQ ID NO: 17841 - DNA, 23 bp, Artificial Sequence
  Synthetic
ccgttttttttttttctgagtgt

SEQ ID NO: 17842 - DNA, 23 bp, Artificial Sequence
  Synthetic
ccgttttttttttttctgagagt

SEQ ID NO: 17843 - DNA, 23 bp, Artificial Sequence
  Synthetic
ccgttttttttttttcagtcggg

SEQ ID NO: 17844 - DNA, 23 bp, Artificial Sequence
  Synthetic
ccgttttttttttttagtcaagg

SEQ ID NO: 17845 - DNA, 23 bp, Artificial Sequence
  Synthetic
ccgttttttttttttgctatgcc

SEQ ID NO: 17846 - DNA, 23 bp, Artificial Sequence
  Synthetic
ccgttttttttttttaacttagt

SEQ ID NO: 17847 - DNA, 23 bp, Artificial Sequence
  Synthetic
ccgttttttttttttatgcaact

SEQ ID NO: 17848 - DNA, 23 bp, Artificial Sequence
  Synthetic
ccgttttttttttttcaaccagc

SEQ ID NO: 17849 - DNA, 23 bp, Artificial Sequence
  Synthetic
ccgttttttttttttatcagcta

SEQ ID NO: 17850 - DNA, 23 bp, Artificial Sequence
  Synthetic
ccgttttttttttttaatcagct

SEQ ID NO: 17851 - DNA, 23 bp, Artificial Sequence
  Synthetic
ccgttttttttttttaggatttt

SEQ ID NO: 17852 - DNA, 23 bp, Artificial Sequence
  Synthetic
ccgttttttttttttccattgct

SEQ ID NO: 17853 - DNA, 23 bp, Artificial Sequence
  Synthetic
ccgttttttttttttcgcgagcc

SEQ ID NO: 17854 - DNA, 23 bp, Artificial Sequence
  Synthetic
ccgttttttttttttccacaatc

SEQ ID NO: 17855 - DNA, 23 bp, Artificial Sequence
  Synthetic
ccgttttttttttttggcattac

SEQ ID NO: 17856 - DNA, 23 bp, Artificial Sequence
  Synthetic
ccgttttttttttttcagctaac

SEQ ID NO: 17857 - DNA, 23 bp, Artificial Sequence
  Synthetic
ccgttttttttttttactcagta

SEQ ID NO: 17858 - DNA, 23 bp, Artificial Sequence
  Synthetic
ccgttttttttttttatgtagtc

SEQ ID NO: 17859 - DNA, 23 bp, Artificial Sequence
  Synthetic
ccgttttttttttttcaaccatc

SEQ ID NO: 17860 - DNA, 23 bp, Artificial Sequence
  Synthetic
ccgttttttttttttcacagtgt

SEQ ID NO: 17861 - DNA, 23 bp, Artificial Sequence
  Synthetic
ccgttttttttttttatgtgtgt

SEQ ID NO: 17862 - DNA, 23 bp, Artificial Sequence
  Synthetic
ccgttttttttttttagccgtac

SEQ ID NO: 17863 - DNA, 23 bp, Artificial Sequence
  Synthetic
ccgttttttttttttgcatggag

SEQ ID NO: 17864 - DNA, 23 bp, Artificial Sequence
  Synthetic
ccgttttttttttttaacatcac

SEQ ID NO: 17865 - DNA, 23 bp, Artificial Sequence
  Synthetic
ccgttttttttttttacaaaatc

SEQ ID NO: 17866 - DNA, 23 bp, Artificial Sequence
  Synthetic
ccgttttttttttttatcccatc

SEQ ID NO: 17867 - DNA, 23 bp, Artificial Sequence
  Synthetic
ccgttttttttttttcaaaaatc

SEQ ID NO: 17868 - DNA, 23 bp, Artificial Sequence
  Synthetic
ccgttttttttttttacagctag

SEQ ID NO: 17869 - DNA, 23 bp, Artificial Sequence
  Synthetic
ccgttttttttttttattcggtt

SEQ ID NO: 17870 - DNA, 23 bp, Artificial Sequence
  Synthetic
ccgttttttttttttggccggga

SEQ ID NO: 17871 - DNA, 23 bp, Artificial Sequence
  Synthetic
ccgttttttttttttcaagatcg

SEQ ID NO: 17872 - DNA, 23 bp, Artificial Sequence
  Synthetic
ccgttttttttttttcaagttcg

SEQ ID NO: 17873 - DNA, 23 bp, Artificial Sequence
  Synthetic
ccgttttttttttttagttatca

SEQ ID NO: 17874 - DNA, 23 bp, Artificial Sequence
  Synthetic
ccgttttttttttttagccctgt

SEQ ID NO: 17875 - DNA, 23 bp, Artificial Sequence
  Synthetic
ccgttttttttttttaggagtct

SEQ ID NO: 17876 - DNA, 23 bp, Artificial Sequence
  Synthetic
ccgttttttttttttacctgcac

SEQ ID NO: 17877 - DNA, 23 bp, Artificial Sequence
  Synthetic
ccgttttttttttttgcactgtc

SEQ ID NO: 17878 - DNA, 23 bp, Artificial Sequence
  Synthetic
ccgttttttttttttagccctgt

SEQ ID NO: 17879 - DNA, 23 bp, Artificial Sequence
  Synthetic
ccgttttttttttttcaaattcg

SEQ ID NO: 17880 - DNA, 23 bp, Artificial Sequence
  Synthetic
ccgttttttttttttaaattcgg

SEQ ID NO: 17881 - DNA, 23 bp, Artificial Sequence
  Synthetic
ccgttttttttttttcattcacc

SEQ ID NO: 17882 - DNA, 23 bp, Artificial Sequence
  Synthetic
ccgttttttttttttcaagttag

SEQ ID NO: 17883 - DNA, 23 bp, Artificial Sequence
  Synthetic
ccgttttttttttttccttttaa

SEQ ID NO: 17884 - DNA, 23 bp, Artificial Sequence
  Synthetic
ccgttttttttttttagctggtt

SEQ ID NO: 17885 - DNA, 23 bp, Artificial Sequence
  Synthetic
ccgttttttttttttctctggtc

SEQ ID NO: 17886 - DNA, 23 bp, Artificial Sequence
  Synthetic
ccgttttttttttttcataggaa

SEQ ID NO: 17887 - DNA, 23 bp, Artificial Sequence
  Synthetic
ccgttttttttttttatcatcaa

SEQ ID NO: 17888 - DNA, 23 bp, Artificial Sequence
  Synthetic
ccgttttttttttttatctttac

SEQ ID NO: 17889 - DNA, 23 bp, Artificial Sequence
  Synthetic
ccgttttttttttttgctacagt

SEQ ID NO: 17890 - DNA, 23 bp, Artificial Sequence
  Synthetic
ccgttttttttttttgggattcc

SEQ ID NO: 17891 - DNA, 23 bp, Artificial Sequence
  Synthetic
ccgttttttttttttcttttgtg

SEQ ID NO: 17892 - DNA, 23 bp, Artificial Sequence
  Synthetic
ccgttttttttttttaaggcaac

SEQ ID NO: 17893 - DNA, 23 bp, Artificial Sequence
  Synthetic
ccgttttttttttttcaaaccat

SEQ ID NO: 17894 - DNA, 23 bp, Artificial Sequence
  Synthetic
ccgttttttttttttaaccatga

SEQ ID NO: 17895 - DNA, 23 bp, Artificial Sequence
  Synthetic
ccgttttttttttttccaatatt

SEQ ID NO: 17896 - DNA, 23 bp, Artificial Sequence
  Synthetic
ccgttttttttttttaagtgcct

SEQ ID NO: 17897 - DNA, 23 bp, Artificial Sequence
  Synthetic
ccgttttttttttttacctgcac

SEQ ID NO: 17898 - DNA, 23 bp, Artificial Sequence
  Synthetic
ccgttttttttttttgcactaga

SEQ ID NO: 17899 - DNA, 23 bp, Artificial Sequence
  Synthetic
ccgttttttttttttcaccgaca

SEQ ID NO: 17900 - DNA, 23 bp, Artificial Sequence
  Synthetic
ccgttttttttttttacaatcaa

SEQ ID NO: 17901 - DNA, 23 bp, Artificial Sequence
  Synthetic
ccgttttttttttttcccaccga

SEQ ID NO: 17902 - DNA, 23 bp, Artificial Sequence
  Synthetic
ccgttttttttttttcaccgaca

SEQ ID NO: 17903 - DNA, 23 bp, Artificial Sequence
  Synthetic
ccgttttttttttttgtgaattc

SEQ ID NO: 17904 - DNA, 23 bp, Artificial Sequence
  Synthetic
ccgttttttttttttgcccaaaa

SEQ ID NO: 17905 - DNA, 23 bp, Artificial Sequence
  Synthetic
ccgttttttttttttgctgcaac

SEQ ID NO: 17906 - DNA, 23 bp, Artificial Sequence
  Synthetic
ccgttttttttttttctaatata

SEQ ID NO: 17907 - DNA, 23 bp, Artificial Sequence
  Synthetic
ccgttttttttttttacatggag

SEQ ID NO: 17908 - DNA, 23 bp, Artificial Sequence
  Synthetic
ccgttttttttttttcaatattt

SEQ ID NO: 17909 - DNA, 23 bp, Artificial Sequence
  Synthetic
ccgttttttttttttaacaacat

SEQ ID NO: 17910 - DNA, 23 bp, Artificial Sequence
  Synthetic
ccgttttttttttttatctcccc

SEQ ID NO: 17911 - DNA, 23 bp, Artificial Sequence
  Synthetic
ccgttttttttttttacaggtag

SEQ ID NO: 17912 - DNA, 23 bp, Artificial Sequence
  Synthetic
ccgttttttttttttgttttgca

SEQ ID NO: 17913 - DNA, 23 bp, Artificial Sequence
  Synthetic
ccgttttttttttttgttttgca

SEQ ID NO: 17914 - DNA, 23 bp, Artificial Sequence
  Synthetic
ccgttttttttttttctgcacta

SEQ ID NO: 17915 - DNA, 23 bp, Artificial Sequence
  Synthetic
ccgttttttttttttatcattac

SEQ ID NO: 17916 - DNA, 23 bp, Artificial Sequence
  Synthetic
ccgttttttttttttgcatagga

SEQ ID NO: 17917 - DNA, 23 bp, Artificial Sequence
  Synthetic
ccgttttttttttttgactccgg

SEQ ID NO: 17918 - DNA, 23 bp, Artificial Sequence
  Synthetic
ccgttttttttttttacatcagt

SEQ ID NO: 17919 - DNA, 23 bp, Artificial Sequence
  Synthetic
ccgttttttttttttcctgtctg

SEQ ID NO: 17920 - DNA, 23 bp, Artificial Sequence
  Synthetic
ccgttttttttttttgtcaattc

SEQ ID NO: 17921 - DNA, 23 bp, Artificial Sequence
  Synthetic
ccgttttttttttttcagttgcc

SEQ ID NO: 17922 - DNA, 23 bp, Artificial Sequence
  Synthetic
ccgttttttttttttcaatcagt

SEQ ID NO: 17923 - DNA, 23 bp, Artificial Sequence
  Synthetic
ccgttttttttttttatggttag

SEQ ID NO: 17924 - DNA, 23 bp, Artificial Sequence
  Synthetic
ccgttttttttttttaattgcgt

SEQ ID NO: 17925 - DNA, 23 bp, Artificial Sequence
  Synthetic
ccgttttttttttttagtgtcag

SEQ ID NO: 17926 - DNA, 23 bp, Artificial Sequence
  Synthetic
ccgttttttttttttaacccagc

SEQ ID NO: 17927 - DNA, 23 bp, Artificial Sequence
  Synthetic
ccgttttttttttttggtatttg

SEQ ID NO: 17928 - DNA, 23 bp, Artificial Sequence
  Synthetic
ccgttttttttttttacggaacc

SEQ ID NO: 17929 - DNA, 23 bp, Artificial Sequence
  Synthetic
ccgttttttttttttaaatccct

SEQ ID NO: 17930 - DNA, 23 bp, Artificial Sequence
  Synthetic
ccgttttttttttttcctgctga

SEQ ID NO: 17931 - DNA, 23 bp, Artificial Sequence
  Synthetic
ccgttttttttttttgaccgaga

SEQ ID NO: 17932 - DNA, 23 bp, Artificial Sequence
  Synthetic
ccgttttttttttttcctatcct

SEQ ID NO: 17933 - DNA, 23 bp, Artificial Sequence
  Synthetic
ccgttttttttttttcggaactt

SEQ ID NO: 17934 - DNA, 23 bp, Artificial Sequence
  Synthetic
ccgttttttttttttaatagact

SEQ ID NO: 17935 - DNA, 23 bp, Artificial Sequence
  Synthetic
ccgttttttttttttccgatttc

SEQ ID NO: 17936 - DNA, 23 bp, Artificial Sequence
  Synthetic
ccgttttttttttttgatttcaa

SEQ ID NO: 17937 - DNA, 23 bp, Artificial Sequence
  Synthetic
ccgttttttttttttgcaaacat

SEQ ID NO: 17938 - DNA, 23 bp, Artificial Sequence
  Synthetic
ccgttttttttttttcagtcgag

SEQ ID NO: 17939 - DNA, 23 bp, Artificial Sequence
  Synthetic
ccgttttttttttttgagtgtag

SEQ ID NO: 17940 - DNA, 23 bp, Artificial Sequence
  Synthetic
ccgttttttttttttcagtcggg

SEQ ID NO: 17941 - DNA, 23 bp, Artificial Sequence
  Synthetic
ccgttttttttttttgctatgcc

SEQ ID NO: 17942 - DNA, 23 bp, Artificial Sequence
  Synthetic
ccgttttttttttttaacttagt

SEQ ID NO: 17943 - DNA, 23 bp, Artificial Sequence
  Synthetic
ccgttttttttttttatgcaact

SEQ ID NO: 17944 - DNA, 23 bp, Artificial Sequence
  Synthetic
ccgttttttttttttaaccagct

SEQ ID NO: 17945 - DNA, 23 bp, Artificial Sequence
  Synthetic
ccgttttttttttttcaaaatca

SEQ ID NO: 17946 - DNA, 23 bp, Artificial Sequence
  Synthetic
ccgttttttttttttacagctag

SEQ ID NO: 17947 - DNA, 23 bp, Artificial Sequence
  Synthetic
ccgttttttttttttaggccggg

SEQ ID NO: 17948 - DNA, 23 bp, Artificial Sequence
  Synthetic
ccgttttttttttttcctgcacg

SEQ ID NO: 17949 - DNA, 23 bp, Artificial Sequence
  Synthetic
ccgttttttttttttcaataaat

SEQ ID NO: 17950 - DNA, 23 bp, Artificial Sequence
  Synthetic
ccgttttttttttttaaaaatgt

SEQ ID NO: 17951 - DNA, 23 bp, Artificial Sequence
  Synthetic
ccgttttttttttttcaatacaa

SEQ ID NO: 17952 - DNA, 23 bp, Artificial Sequence
  Synthetic
ccgttttttttttttcaagatcg

SEQ ID NO: 17953 - DNA, 23 bp, Artificial Sequence
  Synthetic
ccgttttttttttttctcactct

SEQ ID NO: 17954 - DNA, 23 bp, Artificial Sequence
  Synthetic
ccgttttttttttttctctctct

SEQ ID NO: 17955 - DNA, 23 bp, Artificial Sequence
  Synthetic
ccgttttttttttttctctctat

SEQ ID NO: 17956 - DNA, 23 bp, Artificial Sequence
  Synthetic
ccgttttttttttttctctctat

SEQ ID NO: 17957 - DNA, 23 bp, Artificial Sequence
  Synthetic
ccgttttttttttttctctctat

SEQ ID NO: 17958 - DNA, 23 bp, Artificial Sequence
  Synthetic
ccgttttttttttttagctccct

SEQ ID NO: 17959 - DNA, 23 bp, Artificial Sequence
  Synthetic
ccgttttttttttttcatacagg

SEQ ID NO: 17960 - DNA, 23 bp, Artificial Sequence
  Synthetic
ccgttttttttttttggaatgaa

SEQ ID NO: 17961 - DNA, 23 bp, Artificial Sequence
  Synthetic
ccgttttttttttttggaatgaa

SEQ ID NO: 17962 - DNA, 23 bp, Artificial Sequence
  Synthetic
ccgttttttttttttatcatgct

SEQ ID NO: 17963 - DNA, 23 bp, Artificial Sequence
  Synthetic
ccgttttttttttttatcatgct

SEQ ID NO: 17964 - DNA, 23 bp, Artificial Sequence
  Synthetic
ccgttttttttttttcgacctgc

SEQ ID NO: 17965 - DNA, 23 bp, Artificial Sequence
  Synthetic
ccgttttttttttttggcaagtc

SEQ ID NO: 17966 - DNA, 23 bp, Artificial Sequence
  Synthetic
ccgttttttttttttcagcatca

SEQ ID NO: 17967 - DNA, 23 bp, Artificial Sequence
  Synthetic
ccgttttttttttttcagcatca

SEQ ID NO: 17968 - DNA, 23 bp, Artificial Sequence
  Synthetic
ccgttttttttttttgagctccc

SEQ ID NO: 17969 - DNA, 23 bp, Artificial Sequence
  Synthetic
ccgttttttttttttgagctccc

SEQ ID NO: 17970 - DNA, 23 bp, Artificial Sequence
  Synthetic
ccgttttttttttttgagctcct

SEQ ID NO: 17971 - DNA, 23 bp, Artificial Sequence
  Synthetic
ccgttttttttttttgttcaaga

SEQ ID NO: 17972 - DNA, 23 bp, Artificial Sequence
  Synthetic
ccgttttttttttttgttcaaga

SEQ ID NO: 17973 - DNA, 23 bp, Artificial Sequence
  Synthetic
ccgttttttttttttggggtgac

SEQ ID NO: 17974 - DNA, 23 bp, Artificial Sequence
  Synthetic
ccgttttttttttttggggtgac

SEQ ID NO: 17975 - DNA, 23 bp, Artificial Sequence
  Synthetic
ccgttttttttttttcctggatc

SEQ ID NO: 17976 - DNA, 23 bp, Artificial Sequence
  Synthetic
ccgttttttttttttgtgaagaa

SEQ ID NO: 17977 - DNA, 23 bp, Artificial Sequence
  Synthetic
ccgttttttttttttacgggaag

SEQ ID NO: 17978 - DNA, 23 bp, Artificial Sequence
  Synthetic
ccgttttttttttttcaaactag

SEQ ID NO: 17979 - DNA, 23 bp, Artificial Sequence
  Synthetic
ccgttttttttttttcaggtgtc

SEQ ID NO: 17980 - DNA, 23 bp, Artificial Sequence
  Synthetic
ccgttttttttttttgcgcgcca

SEQ ID NO: 17981 - DNA, 23 bp, Artificial Sequence
  Synthetic
ccgttttttttttttgacgaggc

SEQ ID NO: 17982 - DNA, 23 bp, Artificial Sequence
  Synthetic
ccgttttttttttttccgagcca

SEQ ID NO: 17983 - DNA, 23 bp, Artificial Sequence
  Synthetic
ccgttttttttttttgcgggagc

SEQ ID NO: 17984 - DNA, 23 bp, Artificial Sequence
  Synthetic
ccgttttttttttttccacctga

SEQ ID NO: 17985 - DNA, 23 bp, Artificial Sequence
  Synthetic
ccgttttttttttttcccacggt

SEQ ID NO: 17986 - DNA, 23 bp, Artificial Sequence
  Synthetic
ccgttttttttttttcccctgca

SEQ ID NO: 17987 - DNA, 23 bp, Artificial Sequence
  Synthetic
ccgttttttttttttgctctcgt

SEQ ID NO: 17988 - DNA, 23 bp, Artificial Sequence
  Synthetic
ccgttttttttttttcatcgtca

SEQ ID NO: 17989 - DNA, 23 bp, Artificial Sequence
  Synthetic
ccgttttttttttttctatacaa

SEQ ID NO: 17990 - DNA, 23 bp, Artificial Sequence
  Synthetic
ccgttttttttttttccacacaa

SEQ ID NO: 17991 - DNA, 23 bp, Artificial Sequence
  Synthetic
ccgttttttttttttccatacaa

SEQ ID NO: 17992 - DNA, 23 bp, Artificial Sequence
  Synthetic
ccgttttttttttttatgcaacc

SEQ ID NO: 17993 - DNA, 23 bp, Artificial Sequence
  Synthetic
ccgttttttttttttatacaacc

SEQ ID NO: 17994 - DNA, 23 bp, Artificial Sequence
  Synthetic
ccgttttttttttttctatacaa

SEQ ID NO: 17995 - DNA, 23 bp, Artificial Sequence
  Synthetic
ccgttttttttttttgtacaaac

SEQ ID NO: 17996 - DNA, 23 bp, Artificial Sequence
  Synthetic
ccgttttttttttttagcacaaa

SEQ ID NO: 17997 - DNA, 23 bp, Artificial Sequence
  Synthetic
ccgttttttttttttatacttct

SEQ ID NO: 17998 - DNA, 23 bp, Artificial Sequence
  Synthetic
ccgttttttttttttcaagttcg

SEQ ID NO: 17999 - DNA, 23 bp, Artificial Sequence
  Synthetic
ccgttttttttttttagttatca

SEQ ID NO: 18000 - DNA, 23 bp, Artificial Sequence
  Synthetic
ccgttttttttttttagccctgt

SEQ ID NO: 18001 - DNA, 23 bp, Artificial Sequence
  Synthetic
ccgttttttttttttaggagtct

SEQ ID NO: 18002 - DNA, 23 bp, Artificial Sequence
  Synthetic
ccgttttttttttttacctgcac

SEQ ID NO: 18003 - DNA, 23 bp, Artificial Sequence
  Synthetic
ccgttttttttttttgcactgtc

SEQ ID NO: 18004 - DNA, 23 bp, Artificial Sequence
  Synthetic
ccgttttttttttttagccctgt

SEQ ID NO: 18005 - DNA, 23 bp, Artificial Sequence
  Synthetic
ccgttttttttttttcaaattcg

SEQ ID NO: 18006 - DNA, 23 bp, Artificial Sequence
  Synthetic
ccgttttttttttttaaattcgg

SEQ ID NO: 18007 - DNA, 23 bp, Artificial Sequence
  Synthetic
ccgttttttttttttaaacacca

SEQ ID NO: 18008 - DNA, 23 bp, Artificial Sequence
  Synthetic
ccgttttttttttttcattcacc

SEQ ID NO: 18009 - DNA, 23 bp, Artificial Sequence
  Synthetic
ccgttttttttttttcaggttaa

SEQ ID NO: 18010 - DNA, 23 bp, Artificial Sequence
  Synthetic
ccgttttttttttttcaagttag

SEQ ID NO: 18011 - DNA, 23 bp, Artificial Sequence
  Synthetic
ccgttttttttttttattattac

SEQ ID NO: 18012 - DNA, 23 bp, Artificial Sequence
  Synthetic
ccgttttttttttttcgtaccaa

SEQ ID NO: 18013 - DNA, 23 bp, Artificial Sequence
  Synthetic
ccgttttttttttttccaagctc

SEQ ID NO: 18014 - DNA, 23 bp, Artificial Sequence
  Synthetic
ccgttttttttttttaagagacc

SEQ ID NO: 18015 - DNA, 23 bp, Artificial Sequence
  Synthetic
ccgttttttttttttaagagacc

SEQ ID NO: 18016 - DNA, 23 bp, Artificial Sequence
  Synthetic
ccgttttttttttttaagcccag

SEQ ID NO: 18017 - DNA, 23 bp, Artificial Sequence
  Synthetic
ccgttttttttttttccctttta

SEQ ID NO: 18018 - DNA, 23 bp, Artificial Sequence
  Synthetic
ccgttttttttttttccctttca

SEQ ID NO: 18019 - DNA, 23 bp, Artificial Sequence
  Synthetic
ccgttttttttttttaccatggc

SEQ ID NO: 18020 - DNA, 23 bp, Artificial Sequence
  Synthetic
ccgttttttttttttagctggtt

SEQ ID NO: 18021 - DNA, 23 bp, Artificial Sequence
  Synthetic
ccgttttttttttttctggttga

SEQ ID NO: 18022 - DNA, 23 bp, Artificial Sequence
  Synthetic
ccgttttttttttttctctggtc

SEQ ID NO: 18023 - DNA, 23 bp, Artificial Sequence
  Synthetic
ccgttttttttttttcataggaa

SEQ ID NO: 18024 - DNA, 23 bp, Artificial Sequence
  Synthetic
ccgttttttttttttcataggaa

SEQ ID NO: 18025 - DNA, 23 bp, Artificial Sequence
  Synthetic
ccgttttttttttttatcatcaa

SEQ ID NO: 18026 - DNA, 23 bp, Artificial Sequence
  Synthetic
ccgttttttttttttcgcgtatt

SEQ ID NO: 18027 - DNA, 23 bp, Artificial Sequence
  Synthetic
ccgttttttttttttcacaacac

SEQ ID NO: 18028 - DNA, 23 bp, Artificial Sequence
  Synthetic
ccgttttttttttttacacgtgc

SEQ ID NO: 18029 - DNA, 23 bp, Artificial Sequence
  Synthetic
ccgttttttttttttccataggg

SEQ ID NO: 18030 - DNA, 23 bp, Artificial Sequence
  Synthetic
ccgttttttttttttatctttac

SEQ ID NO: 18031 - DNA, 23 bp, Artificial Sequence
  Synthetic
ccgttttttttttttataaagta

SEQ ID NO: 18032 - DNA, 23 bp, Artificial Sequence
  Synthetic
ccgttttttttttttgtgctttc

SEQ ID NO: 18033 - DNA, 23 bp, Artificial Sequence
  Synthetic
ccgttttttttttttgctacagt

SEQ ID NO: 18034 - DNA, 23 bp, Artificial Sequence
  Synthetic
ccgttttttttttttgtacatca

SEQ ID NO: 18035 - DNA, 23 bp, Artificial Sequence
  Synthetic
ccgttttttttttttgggattcc

SEQ ID NO: 18036 - DNA, 23 bp, Artificial Sequence
  Synthetic
ccgttttttttttttcccatgga

SEQ ID NO: 18037 - DNA, 23 bp, Artificial Sequence
  Synthetic
ccgttttttttttttcctatgga

SEQ ID NO: 18038 - DNA, 23 bp, Artificial Sequence
  Synthetic
ccgttttttttttttagaagcat

SEQ ID NO: 18039 - DNA, 23 bp, Artificial Sequence
  Synthetic
ccgttttttttttttaaagttct

SEQ ID NO: 18040 - DNA, 23 bp, Artificial Sequence
  Synthetic
ccgttttttttttttaaagttct

SEQ ID NO: 18041 - DNA, 23 bp, Artificial Sequence
  Synthetic
ccgttttttttttttagtgaaga

SEQ ID NO: 18042 - DNA, 23 bp, Artificial Sequence
  Synthetic
ccgttttttttttttctggtaca

SEQ ID NO: 18043 - DNA, 23 bp, Artificial Sequence
  Synthetic
ccgttttttttttttcaaggagc

SEQ ID NO: 18044 - DNA, 23 bp, Artificial Sequence
  Synthetic
ccgttttttttttttcaagttct

SEQ ID NO: 18045 - DNA, 23 bp, Artificial Sequence
  Synthetic
ccgttttttttttttcttttgtg

SEQ ID NO: 18046 - DNA, 23 bp, Artificial Sequence
  Synthetic
ccgttttttttttttaaggcaac

SEQ ID NO: 18047 - DNA, 23 bp, Artificial Sequence
  Synthetic
ccgttttttttttttaggtcaac

SEQ ID NO: 18048 - DNA, 23 bp, Artificial Sequence
  Synthetic
ccgttttttttttttcctatcac

SEQ ID NO: 18049 - DNA, 23 bp, Artificial Sequence
  Synthetic
ccgttttttttttttcaaaccat

SEQ ID NO: 18050 - DNA, 23 bp, Artificial Sequence
  Synthetic
ccgttttttttttttaaccatga

SEQ ID NO: 18051 - DNA, 23 bp, Artificial Sequence
  Synthetic
ccgttttttttttttccaatatt

SEQ ID NO: 18052 - DNA, 23 bp, Artificial Sequence
  Synthetic
ccgttttttttttttaagtgcct

SEQ ID NO: 18053 - DNA, 23 bp, Artificial Sequence
  Synthetic
ccgttttttttttttacctgcac

SEQ ID NO: 18054 - DNA, 23 bp, Artificial Sequence
  Synthetic
ccgttttttttttttcaccgaca

SEQ ID NO: 18055 - DNA, 23 bp, Artificial Sequence
  Synthetic
ccgttttttttttttacaatcaa

SEQ ID NO: 18056 - DNA, 23 bp, Artificial Sequence
  Synthetic
ccgttttttttttttcaccgaca

SEQ ID NO: 18057 - DNA, 23 bp, Artificial Sequence
  Synthetic
ccgttttttttttttcaccgaca

SEQ ID NO: 18058 - DNA, 23 bp, Artificial Sequence
  Synthetic
ccgttttttttttttcccaccga

SEQ ID NO: 18059 - DNA, 23 bp, Artificial Sequence
  Synthetic
ccgttttttttttttagttctac

SEQ ID NO: 18060 - DNA, 23 bp, Artificial Sequence
  Synthetic
ccgttttttttttttggcaagtc

SEQ ID NO: 18061 - DNA, 23 bp, Artificial Sequence
  Synthetic
ccgttttttttttttgtgaattc

SEQ ID NO: 18062 - DNA, 23 bp, Artificial Sequence
  Synthetic
ccgttttttttttttccttatca

SEQ ID NO: 18063 - DNA, 23 bp, Artificial Sequence
  Synthetic
ccgttttttttttttactgcctt

SEQ ID NO: 18064 - DNA, 23 bp, Artificial Sequence
  Synthetic
ccgttttttttttttgcccaaaa

SEQ ID NO: 18065 - DNA, 23 bp, Artificial Sequence
  Synthetic
ccgttttttttttttgctgcaac

SEQ ID NO: 18066 - DNA, 23 bp, Artificial Sequence
  Synthetic
ccgttttttttttttcctccacc

SEQ ID NO: 18067 - DNA, 23 bp, Artificial Sequence
  Synthetic
ccgttttttttttttgatatcag

SEQ ID NO: 18068 - DNA, 23 bp, Artificial Sequence
  Synthetic
ccgttttttttttttgcactaga

SEQ ID NO: 18069 - DNA, 23 bp, Artificial Sequence
  Synthetic
ccgttttttttttttaaggagca

SEQ ID NO: 18070 - DNA, 23 bp, Artificial Sequence
  Synthetic
ccgttttttttttttctgcacta

SEQ ID NO: 18071 - DNA, 23 bp, Artificial Sequence
  Synthetic
ccgttttttttttttctaatata

SEQ ID NO: 18072 - DNA, 23 bp, Artificial Sequence
  Synthetic
ccgttttttttttttctgctttt

SEQ ID NO: 18073 - DNA, 23 bp, Artificial Sequence
  Synthetic
ccgttttttttttttggacgaaa

SEQ ID NO: 18074 - DNA, 23 bp, Artificial Sequence
  Synthetic
ccgttttttttttttctgtcaat

SEQ ID NO: 18075 - DNA, 23 bp, Artificial Sequence
  Synthetic
ccgttttttttttttggactttg

SEQ ID NO: 18076 - DNA, 23 bp, Artificial Sequence
  Synthetic
ccgttttttttttttagcgggac

SEQ ID NO: 18077 - DNA, 23 bp, Artificial Sequence
  Synthetic
ccgttttttttttttacatggag

SEQ ID NO: 18078 - DNA, 23 bp, Artificial Sequence
  Synthetic
ccgttttttttttttcaatattt

SEQ ID NO: 18079 - DNA, 23 bp, Artificial Sequence
  Synthetic
ccgttttttttttttaacaacat

SEQ ID NO: 18080 - DNA, 23 bp, Artificial Sequence
  Synthetic
ccgttttttttttttaacaacag

SEQ ID NO: 18081 - DNA, 23 bp, Artificial Sequence
  Synthetic
ccgttttttttttttgggtggag

SEQ ID NO: 18082 - DNA, 23 bp, Artificial Sequence
  Synthetic
ccgttttttttttttatctcccc

SEQ ID NO: 18083 - DNA, 23 bp, Artificial Sequence
  Synthetic
ccgttttttttttttacaggtag

SEQ ID NO: 18084 - DNA, 23 bp, Artificial Sequence
  Synthetic
ccgttttttttttttccaatgtg

SEQ ID NO: 18085 - DNA, 23 bp, Artificial Sequence
  Synthetic
ccgttttttttttttacagatag

SEQ ID NO: 18086 - DNA, 23 bp, Artificial Sequence
  Synthetic
ccgttttttttttttgttttgca

SEQ ID NO: 18087 - DNA, 23 bp, Artificial Sequence
  Synthetic
ccgttttttttttttgttttgca

SEQ ID NO: 18088 - DNA, 23 bp, Artificial Sequence
  Synthetic
ccgttttttttttttatcgttac

SEQ ID NO: 18089 - DNA, 23 bp, Artificial Sequence
  Synthetic
ccgttttttttttttagcactgt

SEQ ID NO: 18090 - DNA, 23 bp, Artificial Sequence
  Synthetic
ccgttttttttttttatcattac

SEQ ID NO: 18091 - DNA, 23 bp, Artificial Sequence
  Synthetic
ccgttttttttttttatcattac

SEQ ID NO: 18092 - DNA, 23 bp, Artificial Sequence
  Synthetic
ccgttttttttttttcatgccct

SEQ ID NO: 18093 - DNA, 23 bp, Artificial Sequence
  Synthetic
ccgttttttttttttagaagtat

SEQ ID NO: 18094 - DNA, 23 bp, Artificial Sequence
  Synthetic
ccgttttttttttttgtggtcct

SEQ ID NO: 18095 - DNA, 23 bp, Artificial Sequence
  Synthetic
ccgttttttttttttgcatagga

SEQ ID NO: 18096 - DNA, 23 bp, Artificial Sequence
  Synthetic
ccgttttttttttttgactccgg

SEQ ID NO: 18097 - DNA, 23 bp, Artificial Sequence
  Synthetic
ccgttttttttttttacacactt

SEQ ID NO: 18098 - DNA, 23 bp, Artificial Sequence
  Synthetic
ccgttttttttttttaagctttt

SEQ ID NO: 18099 - DNA, 23 bp, Artificial Sequence
  Synthetic
ccgttttttttttttcctgcact

SEQ ID NO: 18100 - DNA, 23 bp, Artificial Sequence
  Synthetic
ccgttttttttttttcctgcact

SEQ ID NO: 18101 - DNA, 23 bp, Artificial Sequence
  Synthetic
ccgttttttttttttacatcagt

SEQ ID NO: 18102 - DNA, 23 bp, Artificial Sequence
  Synthetic
ccgttttttttttttgccgctgt

SEQ ID NO: 18103 - DNA, 23 bp, Artificial Sequence
  Synthetic
ccgttttttttttttgcgaagga

SEQ ID NO: 18104 - DNA, 23 bp, Artificial Sequence
  Synthetic
ccgttttttttttttccgtgact

SEQ ID NO: 18105 - DNA, 23 bp, Artificial Sequence
  Synthetic
ccgttttttttttttcctgtctg

SEQ ID NO: 18106 - DNA, 23 bp, Artificial Sequence
  Synthetic
ccgttttttttttttgtcaattc

SEQ ID NO: 18107 - DNA, 23 bp, Artificial Sequence
  Synthetic
ccgttttttttttttcagttgcc

SEQ ID NO: 18108 - DNA, 23 bp, Artificial Sequence
  Synthetic
ccgttttttttttttcaatcagt

SEQ ID NO: 18109 - DNA, 23 bp, Artificial Sequence
  Synthetic
ccgttttttttttttatggttag

SEQ ID NO: 18110 - DNA, 23 bp, Artificial Sequence
  Synthetic
ccgttttttttttttaattgcgt

SEQ ID NO: 18111 - DNA, 23 bp, Artificial Sequence
  Synthetic
ccgttttttttttttagttcttc

SEQ ID NO: 18112 - DNA, 23 bp, Artificial Sequence
  Synthetic
ccgttttttttttttagtgtcag

SEQ ID NO: 18113 - DNA, 23 bp, Artificial Sequence
  Synthetic
ccgttttttttttttaacccagc

SEQ ID NO: 18114 - DNA, 23 bp, Artificial Sequence
  Synthetic
ccgttttttttttttgacccagt

SEQ ID NO: 18115 - DNA, 23 bp, Artificial Sequence
  Synthetic
ccgttttttttttttggtatttg

SEQ ID NO: 18116 - DNA, 23 bp, Artificial Sequence
  Synthetic
ccgttttttttttttacggaacc

SEQ ID NO: 18117 - DNA, 23 bp, Artificial Sequence
  Synthetic
ccgttttttttttttaaatccct

SEQ ID NO: 18118 - DNA, 23 bp, Artificial Sequence
  Synthetic
ccgttttttttttttaatccctg

SEQ ID NO: 18119 - DNA, 23 bp, Artificial Sequence
  Synthetic
ccgttttttttttttcctgctga

SEQ ID NO: 18120 - DNA, 23 bp, Artificial Sequence
  Synthetic
ccgttttttttttttgaccgaga

SEQ ID NO: 18121 - DNA, 23 bp, Artificial Sequence
  Synthetic
ccgttttttttttttctatcctg

SEQ ID NO: 18122 - DNA, 23 bp, Artificial Sequence
  Synthetic
ccgttttttttttttcctatcct

SEQ ID NO: 18123 - DNA, 23 bp, Artificial Sequence
  Synthetic
ccgttttttttttttggaactta

SEQ ID NO: 18124 - DNA, 23 bp, Artificial Sequence
  Synthetic
ccgttttttttttttagaactta

SEQ ID NO: 18125 - DNA, 23 bp, Artificial Sequence
  Synthetic
ccgttttttttttttaatagact

SEQ ID NO: 18126 - DNA, 23 bp, Artificial Sequence
  Synthetic
ccgttttttttttttaggattga

SEQ ID NO: 18127 - DNA, 23 bp, Artificial Sequence
  Synthetic
ccgttttttttttttgcggttta

SEQ ID NO: 18128 - DNA, 23 bp, Artificial Sequence
  Synthetic
ccgttttttttttttatgtggga

SEQ ID NO: 18129 - DNA, 23 bp, Artificial Sequence
  Synthetic
ccgttttttttttttccgatttc

SEQ ID NO: 18130 - DNA, 23 bp, Artificial Sequence
  Synthetic
ccgttttttttttttcactgatt

SEQ ID NO: 18131 - DNA, 23 bp, Artificial Sequence
  Synthetic
ccgttttttttttttcgatttca

SEQ ID NO: 18132 - DNA, 23 bp, Artificial Sequence
  Synthetic
ccgttttttttttttgacaatac

SEQ ID NO: 18133 - DNA, 23 bp, Artificial Sequence
  Synthetic
ccgttttttttttttccaaaaca

SEQ ID NO: 18134 - DNA, 23 bp, Artificial Sequence
  Synthetic
ccgttttttttttttagcaagta

SEQ ID NO: 18135 - DNA, 23 bp, Artificial Sequence
  Synthetic
ccgttttttttttttctaaaaca

SEQ ID NO: 18136 - DNA, 23 bp, Artificial Sequence
  Synthetic
ccgttttttttttttaaagcact

SEQ ID NO: 18137 - DNA, 23 bp, Artificial Sequence
  Synthetic
ccgttttttttttttactgaaac

SEQ ID NO: 18138 - DNA, 23 bp, Artificial Sequence
  Synthetic
ccgttttttttttttgcaggtac

SEQ ID NO: 18139 - DNA, 23 bp, Artificial Sequence
  Synthetic
ccgttttttttttttactcaaac

SEQ ID NO: 18140 - DNA, 23 bp, Artificial Sequence
  Synthetic
ccgttttttttttttgcaaacat

SEQ ID NO: 18141 - DNA, 23 bp, Artificial Sequence
  Synthetic
ccgttttttttttttcagtcgag

SEQ ID NO: 18142 - DNA, 23 bp, Artificial Sequence
  Synthetic
ccgttttttttttttctgagtgt

SEQ ID NO: 18143 - DNA, 23 bp, Artificial Sequence
  Synthetic
ccgttttttttttttgagagtgt

SEQ ID NO: 18144 - DNA, 23 bp, Artificial Sequence
  Synthetic
ccgttttttttttttcagtcggg

SEQ ID NO: 18145 - DNA, 23 bp, Artificial Sequence
  Synthetic
ccgttttttttttttgtaaacat

SEQ ID NO: 18146 - DNA, 23 bp, Artificial Sequence
  Synthetic
ccgttttttttttttagtcaagg

SEQ ID NO: 18147 - DNA, 23 bp, Artificial Sequence
  Synthetic
ccgttttttttttttgctatgcc

SEQ ID NO: 18148 - DNA, 23 bp, Artificial Sequence
  Synthetic
ccgttttttttttttaacttagt

SEQ ID NO: 18149 - DNA, 23 bp, Artificial Sequence
  Synthetic
ccgttttttttttttccctctca

SEQ ID NO: 18150 - DNA, 23 bp, Artificial Sequence
  Synthetic
ccgttttttttttttaggtcgac

SEQ ID NO: 18151 - DNA, 23 bp, Artificial Sequence
  Synthetic
ccgttttttttttttagcagcac

SEQ ID NO: 18152 - DNA, 23 bp, Artificial Sequence
  Synthetic
ccgttttttttttttaccaatgc

SEQ ID NO: 18153 - DNA, 23 bp, Artificial Sequence
  Synthetic
ccgttttttttttttacttactg

SEQ ID NO: 18154 - DNA, 23 bp, Artificial Sequence
  Synthetic
ccgttttttttttttgaggaagg

SEQ ID NO: 18155 - DNA, 23 bp, Artificial Sequence
  Synthetic
ccgttttttttttttggaagggc

SEQ ID NO: 18156 - DNA, 23 bp, Artificial Sequence
  Synthetic
ccgttttttttttttagaggtta

SEQ ID NO: 18157 - DNA, 23 bp, Artificial Sequence
  Synthetic
ccgttttttttttttatgcaact

SEQ ID NO: 18158 - DNA, 23 bp, Artificial Sequence
  Synthetic
ccgttttttttttttgcaggccg

SEQ ID NO: 18159 - DNA, 23 bp, Artificial Sequence
  Synthetic
ccgttttttttttttggataggc

SEQ ID NO: 18160 - DNA, 23 bp, Artificial Sequence
  Synthetic
ccgttttttttttttatttttcg

SEQ ID NO: 18161 - DNA, 23 bp, Artificial Sequence
  Synthetic
ccgttttttttttttaggcatca

SEQ ID NO: 18162 - DNA, 23 bp, Artificial Sequence
  Synthetic
ccgttttttttttttacaaaatc

SEQ ID NO: 18163 - DNA, 23 bp, Artificial Sequence
  Synthetic
ccgttttttttttttgctcctgg

SEQ ID NO: 18164 - DNA, 23 bp, Artificial Sequence
  Synthetic
ccgttttttttttttaatgcaac

SEQ ID NO: 18165 - DNA, 23 bp, Artificial Sequence
  Synthetic
ccgttttttttttttctataaag

SEQ ID NO: 18166 - DNA, 23 bp, Artificial Sequence
  Synthetic
ccgttttttttttttcgggtgcg

SEQ ID NO: 18167 - DNA, 23 bp, Artificial Sequence
  Synthetic
ccgttttttttttttcctggact

SEQ ID NO: 18168 - DNA, 23 bp, Artificial Sequence
  Synthetic
ccgttttttttttttaggcaggc

SEQ ID NO: 18169 - DNA, 23 bp, Artificial Sequence
  Synthetic
ccgttttttttttttcaaccagc

SEQ ID NO: 18170 - DNA, 23 bp, Artificial Sequence
  Synthetic
ccgttttttttttttatcagcta

SEQ ID NO: 18171 - DNA, 23 bp, Artificial Sequence
  Synthetic
ccgttttttttttttaatcagct

SEQ ID NO: 18172 - DNA, 23 bp, Artificial Sequence
  Synthetic
ccgttttttttttttcccctgga

SEQ ID NO: 18173 - DNA, 23 bp, Artificial Sequence
  Synthetic
ccgttttttttttttcacaccta

SEQ ID NO: 18174 - DNA, 23 bp, Artificial Sequence
  Synthetic
ccgttttttttttttagatggat

SEQ ID NO: 18175 - DNA, 23 bp, Artificial Sequence
  Synthetic
ccgttttttttttttattgcatc

SEQ ID NO: 18176 - DNA, 23 bp, Artificial Sequence
  Synthetic
ccgttttttttttttaggatttt

SEQ ID NO: 18177 - DNA, 23 bp, Artificial Sequence
  Synthetic
ccgttttttttttttccattgct

SEQ ID NO: 18178 - DNA, 23 bp, Artificial Sequence
  Synthetic
ccgttttttttttttacgtggaa

SEQ ID NO: 18179 - DNA, 23 bp, Artificial Sequence
  Synthetic
ccgttttttttttttagatcaac

SEQ ID NO: 18180 - DNA, 23 bp, Artificial Sequence
  Synthetic
ccgttttttttttttgaatataa

SEQ ID NO: 18181 - DNA, 23 bp, Artificial Sequence
  Synthetic
ccgttttttttttttaggttcca

SEQ ID NO: 18182 - DNA, 23 bp, Artificial Sequence
  Synthetic
ccgttttttttttttactcaaaa

SEQ ID NO: 18183 - DNA, 23 bp, Artificial Sequence
  Synthetic
ccgttttttttttttgctcaaat

SEQ ID NO: 18184 - DNA, 23 bp, Artificial Sequence
  Synthetic
ccgttttttttttttaccccaaa

SEQ ID NO: 18185 - DNA, 23 bp, Artificial Sequence
  Synthetic
ccgttttttttttttaaagcgcc

SEQ ID NO: 18186 - DNA, 23 bp, Artificial Sequence
  Synthetic
ccgttttttttttttcttatcag

SEQ ID NO: 18187 - DNA, 23 bp, Artificial Sequence
  Synthetic
ccgttttttttttttcgcgagcc

SEQ ID NO: 18188 - DNA, 23 bp, Artificial Sequence
  Synthetic
ccgttttttttttttgtggattt

SEQ ID NO: 18189 - DNA, 23 bp, Artificial Sequence
  Synthetic
ccgttttttttttttatagaagg

SEQ ID NO: 18190 - DNA, 23 bp, Artificial Sequence
  Synthetic
ccgttttttttttttcatggatt

SEQ ID NO: 18191 - DNA, 23 bp, Artificial Sequence
  Synthetic
ccgttttttttttttaaaagttg

SEQ ID NO: 18192 - DNA, 23 bp, Artificial Sequence
  Synthetic
ccgttttttttttttacaggacc

SEQ ID NO: 18193 - DNA, 23 bp, Artificial Sequence
  Synthetic
ccgttttttttttttgttccata

SEQ ID NO: 18194 - DNA, 23 bp, Artificial Sequence
  Synthetic
ccgttttttttttttgatgtgga

SEQ ID NO: 18195 - DNA, 23 bp, Artificial Sequence
  Synthetic
ccgttttttttttttgcatgttc

SEQ ID NO: 18196 - DNA, 23 bp, Artificial Sequence
  Synthetic
ccgttttttttttttagagagct

SEQ ID NO: 18197 - DNA, 23 bp, Artificial Sequence
  Synthetic
ccgttttttttttttaatccacc

SEQ ID NO: 18198 - DNA, 23 bp, Artificial Sequence
  Synthetic
ccgttttttttttttccacaatc

SEQ ID NO: 18199 - DNA, 23 bp, Artificial Sequence
  Synthetic
ccgttttttttttttaacaattt

SEQ ID NO: 18200 - DNA, 23 bp, Artificial Sequence
  Synthetic
ccgttttttttttttgggttcac

SEQ ID NO: 18201 - DNA, 23 bp, Artificial Sequence
  Synthetic
ccgttttttttttttaaagttgc

SEQ ID NO: 18202 - DNA, 23 bp, Artificial Sequence
  Synthetic
ccgttttttttttttaggccatc

SEQ ID NO: 18203 - DNA, 23 bp, Artificial Sequence
  Synthetic
ccgttttttttttttacgctata

SEQ ID NO: 18204 - DNA, 23 bp, Artificial Sequence
  Synthetic
ccgttttttttttttggctagtg

SEQ ID NO: 18205 - DNA, 23 bp, Artificial Sequence
  Synthetic
ccgttttttttttttgcccaatt

SEQ ID NO: 18206 - DNA, 23 bp, Artificial Sequence
  Synthetic
ccgttttttttttttccttctga

SEQ ID NO: 18207 - DNA, 23 bp, Artificial Sequence
  Synthetic
ccgttttttttttttccttctga

SEQ ID NO: 18208 - DNA, 23 bp, Artificial Sequence
  Synthetic
ccgttttttttttttaggggcct

SEQ ID NO: 18209 - DNA, 23 bp, Artificial Sequence
  Synthetic
ccgttttttttttttaaacatga

SEQ ID NO: 18210 - DNA, 23 bp, Artificial Sequence
  Synthetic
ccgttttttttttttcggacacg

SEQ ID NO: 18211 - DNA, 23 bp, Artificial Sequence
  Synthetic
ccgttttttttttttacgggagt

SEQ ID NO: 18212 - DNA, 23 bp, Artificial Sequence
  Synthetic
ccgttttttttttttggttttac

SEQ ID NO: 18213 - DNA, 23 bp, Artificial Sequence
  Synthetic
ccgttttttttttttatgacggc

SEQ ID NO: 18214 - DNA, 23 bp, Artificial Sequence
  Synthetic
ccgttttttttttttacccaatg

SEQ ID NO: 18215 - DNA, 23 bp, Artificial Sequence
  Synthetic
ccgttttttttttttacatggag

SEQ ID NO: 18216 - DNA, 23 bp, Artificial Sequence
  Synthetic
ccgttttttttttttaccgagga

SEQ ID NO: 18217 - DNA, 23 bp, Artificial Sequence
  Synthetic
ccgttttttttttttggacatcc

SEQ ID NO: 18218 - DNA, 23 bp, Artificial Sequence
  Synthetic
ccgttttttttttttcagctaac

SEQ ID NO: 18219 - DNA, 23 bp, Artificial Sequence
  Synthetic
ccgttttttttttttcagctaac

SEQ ID NO: 18220 - DNA, 23 bp, Artificial Sequence
  Synthetic
ccgttttttttttttggaacaca

SEQ ID NO: 18221 - DNA, 23 bp, Artificial Sequence
  Synthetic
ccgttttttttttttactcagta

SEQ ID NO: 18222 - DNA, 23 bp, Artificial Sequence
  Synthetic
ccgttttttttttttcagtttcc

SEQ ID NO: 18223 - DNA, 23 bp, Artificial Sequence
  Synthetic
ccgttttttttttttgcagatga

SEQ ID NO: 18224 - DNA, 23 bp, Artificial Sequence
  Synthetic
ccgttttttttttttaactcacc

SEQ ID NO: 18225 - DNA, 23 bp, Artificial Sequence
  Synthetic
ccgttttttttttttaccctata

SEQ ID NO: 18226 - DNA, 23 bp, Artificial Sequence
  Synthetic
ccgttttttttttttagagacaa

SEQ ID NO: 18227 - DNA, 23 bp, Artificial Sequence
  Synthetic
ccgttttttttttttatgtagtc

SEQ ID NO: 18228 - DNA, 23 bp, Artificial Sequence
  Synthetic
ccgttttttttttttaagacggg

SEQ ID NO: 18229 - DNA, 23 bp, Artificial Sequence
  Synthetic
ccgttttttttttttgggagggg

SEQ ID NO: 18230 - DNA, 23 bp, Artificial Sequence
  Synthetic
ccgttttttttttttagaggaga

SEQ ID NO: 18231 - DNA, 23 bp, Artificial Sequence
  Synthetic
ccgttttttttttttattcatca

SEQ ID NO: 18232 - DNA, 23 bp, Artificial Sequence
  Synthetic
ccgttttttttttttggggcagc

SEQ ID NO: 18233 - DNA, 23 bp, Artificial Sequence
  Synthetic
ccgttttttttttttctggatgt

SEQ ID NO: 18234 - DNA, 23 bp, Artificial Sequence
  Synthetic
ccgttttttttttttgtggatga

SEQ ID NO: 18235 - DNA, 23 bp, Artificial Sequence
  Synthetic
ccgttttttttttttgagtgcca

SEQ ID NO: 18236 - DNA, 23 bp, Artificial Sequence
  Synthetic
ccgttttttttttttgccgtata

SEQ ID NO: 18237 - DNA, 23 bp, Artificial Sequence
  Synthetic
ccgttttttttttttgcatggag

SEQ ID NO: 18238 - DNA, 23 bp, Artificial Sequence
  Synthetic
ccgttttttttttttcatggaag

SEQ ID NO: 18239 - DNA, 23 bp, Artificial Sequence
  Synthetic
ccgttttttttttttgaatcttg

SEQ ID NO: 18240 - DNA, 23 bp, Artificial Sequence
  Synthetic
ccgttttttttttttgcacacag

SEQ ID NO: 18241 - DNA, 23 bp, Artificial Sequence
  Synthetic
ccgttttttttttttgaaagcct

SEQ ID NO: 18242 - DNA, 23 bp, Artificial Sequence
  Synthetic
ccgttttttttttttgaggtttc

SEQ ID NO: 18243 - DNA, 23 bp, Artificial Sequence
  Synthetic
ccgttttttttttttagaagtgc

SEQ ID NO: 18244 - DNA, 23 bp, Artificial Sequence
  Synthetic
ccgttttttttttttgattggcc

SEQ ID NO: 18245 - DNA, 23 bp, Artificial Sequence
  Synthetic
ccgttttttttttttaaaccaca

SEQ ID NO: 18246 - DNA, 23 bp, Artificial Sequence
  Synthetic
ccgttttttttttttaaaacgcc

SEQ ID NO: 18247 - DNA, 23 bp, Artificial Sequence
  Synthetic
ccgttttttttttttacatcact

SEQ ID NO: 18248 - DNA, 23 bp, Artificial Sequence
  Synthetic
ccgttttttttttttgaatcctt

SEQ ID NO: 18249 - DNA, 23 bp, Artificial Sequence
  Synthetic
ccgttttttttttttacccaggg

SEQ ID NO: 18250 - DNA, 23 bp, Artificial Sequence
  Synthetic
ccgttttttttttttcacccaga

SEQ ID NO: 18251 - DNA, 23 bp, Artificial Sequence
  Synthetic
ccgttttttttttttcagaactg

SEQ ID NO: 18252 - DNA, 23 bp, Artificial Sequence
  Synthetic
ccgttttttttttttgagtgcag

SEQ ID NO: 18253 - DNA, 23 bp, Artificial Sequence
  Synthetic
ccgttttttttttttggaaacca

SEQ ID NO: 18254 - DNA, 23 bp, Artificial Sequence
  Synthetic
ccgttttttttttttctcagaag

SEQ ID NO: 18255 - DNA, 23 bp, Artificial Sequence
  Synthetic
ccgttttttttttttctccaaaa

SEQ ID NO: 18256 - DNA, 23 bp, Artificial Sequence
  Synthetic
ccgttttttttttttctccaaaa

SEQ ID NO: 18257 - DNA, 23 bp, Artificial Sequence
  Synthetic
ccgttttttttttttcccacaga

SEQ ID NO: 18258 - DNA, 23 bp, Artificial Sequence
  Synthetic
ccgttttttttttttattgccac

SEQ ID NO: 18259 - DNA, 23 bp, Artificial Sequence
  Synthetic
ccgttttttttttttctgcagag

SEQ ID NO: 18260 - DNA, 23 bp, Artificial Sequence
  Synthetic
ccgttttttttttttcctcagct

SEQ ID NO: 18261 - DNA, 23 bp, Artificial Sequence
  Synthetic
ccgttttttttttttaagtgccc

SEQ ID NO: 18262 - DNA, 23 bp, Artificial Sequence
  Synthetic
ccgttttttttttttaatgacac

SEQ ID NO: 18263 - DNA, 23 bp, Artificial Sequence
  Synthetic
ccgttttttttttttctcacaga

SEQ ID NO: 18264 - DNA, 23 bp, Artificial Sequence
  Synthetic
ccgttttttttttttgctccaaa

SEQ ID NO: 18265 - DNA, 23 bp, Artificial Sequence
  Synthetic
ccgttttttttttttgaaagtgc

SEQ ID NO: 18266 - DNA, 23 bp, Artificial Sequence
  Synthetic
ccgttttttttttttcctctgaa

SEQ ID NO: 18267 - DNA, 23 bp, Artificial Sequence
  Synthetic
ccgttttttttttttagtgcttc

SEQ ID NO: 18268 - DNA, 23 bp, Artificial Sequence
  Synthetic
ccgttttttttttttacagtgct

SEQ ID NO: 18269 - DNA, 23 bp, Artificial Sequence
  Synthetic
ccgttttttttttttcactctaa

SEQ ID NO: 18270 - DNA, 23 bp, Artificial Sequence
  Synthetic
ccgttttttttttttcactctaa

SEQ ID NO: 18271 - DNA, 23 bp, Artificial Sequence
  Synthetic
ccgttttttttttttactctaaa

SEQ ID NO: 18272 - DNA, 23 bp, Artificial Sequence
  Synthetic
ccgttttttttttttagcaaagg

SEQ ID NO: 18273 - DNA, 23 bp, Artificial Sequence
  Synthetic
ccgttttttttttttctctaaag

SEQ ID NO: 18274 - DNA, 23 bp, Artificial Sequence
  Synthetic
ccgttttttttttttctctaaag

SEQ ID NO: 18275 - DNA, 23 bp, Artificial Sequence
  Synthetic
ccgttttttttttttgaaagtgc

SEQ ID NO: 18276 - DNA, 23 bp, Artificial Sequence
  Synthetic
ccgttttttttttttccaaaggg

SEQ ID NO: 18277 - DNA, 23 bp, Artificial Sequence
  Synthetic
ccgttttttttttttactctgaa

SEQ ID NO: 18278 - DNA, 23 bp, Artificial Sequence
  Synthetic
ccgttttttttttttctaaagag

SEQ ID NO: 18279 - DNA, 23 bp, Artificial Sequence
  Synthetic
ccgttttttttttttagaaagtg

SEQ ID NO: 18280 - DNA, 23 bp, Artificial Sequence
  Synthetic
ccgttttttttttttacactcta

SEQ ID NO: 18281 - DNA, 23 bp, Artificial Sequence
  Synthetic
ccgttttttttttttacctctaa

SEQ ID NO: 18282 - DNA, 23 bp, Artificial Sequence
  Synthetic
ccgttttttttttttctctaaaa

SEQ ID NO: 18283 - DNA, 23 bp, Artificial Sequence
  Synthetic
ccgttttttttttttactctaaa

SEQ ID NO: 18284 - DNA, 23 bp, Artificial Sequence
  Synthetic
ccgttttttttttttactctaaa

SEQ ID NO: 18285 - DNA, 23 bp, Artificial Sequence
  Synthetic
ccgttttttttttttaagtgctc

SEQ ID NO: 18286 - DNA, 23 bp, Artificial Sequence
  Synthetic
ccgttttttttttttagtccaaa

SEQ ID NO: 18287 - DNA, 23 bp, Artificial Sequence
  Synthetic
ccgttttttttttttaaagtact

SEQ ID NO: 18288 - DNA, 23 bp, Artificial Sequence
  Synthetic
ccgttttttttttttctctaaaa

SEQ ID NO: 18289 - DNA, 23 bp, Artificial Sequence
  Synthetic
ccgttttttttttttccctctaa

SEQ ID NO: 18290 - DNA, 23 bp, Artificial Sequence
  Synthetic
ccgttttttttttttcccaccaa

SEQ ID NO: 18291 - DNA, 23 bp, Artificial Sequence
  Synthetic
ccgttttttttttttgaaagggc

SEQ ID NO: 18292 - DNA, 23 bp, Artificial Sequence
  Synthetic
ccgttttttttttttctcaaaaa

SEQ ID NO: 18293 - DNA, 23 bp, Artificial Sequence
  Synthetic
ccgttttttttttttccctctaa

SEQ ID NO: 18294 - DNA, 23 bp, Artificial Sequence
  Synthetic
ccgttttttttttttactctaaa

SEQ ID NO: 18295 - DNA, 23 bp, Artificial Sequence
  Synthetic
ccgttttttttttttctaaaggg

SEQ ID NO: 18296 - DNA, 23 bp, Artificial Sequence
  Synthetic
ccgttttttttttttactctaaa

SEQ ID NO: 18297 - DNA, 23 bp, Artificial Sequence
  Synthetic
ccgttttttttttttcactctaa

SEQ ID NO: 18298 - DNA, 23 bp, Artificial Sequence
  Synthetic
ccgttttttttttttctctatag

SEQ ID NO: 18299 - DNA, 23 bp, Artificial Sequence
  Synthetic
ccgttttttttttttccaaaggg

SEQ ID NO: 18300 - DNA, 23 bp, Artificial Sequence
  Synthetic
ccgttttttttttttgaaagtgc

SEQ ID NO: 18301 - DNA, 23 bp, Artificial Sequence
  Synthetic
ccgttttttttttttaaagtgca

SEQ ID NO: 18302 - DNA, 23 bp, Artificial Sequence
  Synthetic
ccgttttttttttttctaaaggg

SEQ ID NO: 18303 - DNA, 23 bp, Artificial Sequence
  Synthetic
ccgttttttttttttaaagtgct

SEQ ID NO: 18304 - DNA, 23 bp, Artificial Sequence
  Synthetic
ccgttttttttttttcagaaagt

SEQ ID NO: 18305 - DNA, 23 bp, Artificial Sequence
  Synthetic
ccgttttttttttttctctaaaa

SEQ ID NO: 18306 - DNA, 23 bp, Artificial Sequence
  Synthetic
ccgttttttttttttcagaaagc

SEQ ID NO: 18307 - DNA, 23 bp, Artificial Sequence
  Synthetic
ccgttttttttttttaaagggct

SEQ ID NO: 18308 - DNA, 23 bp, Artificial Sequence
  Synthetic
ccgttttttttttttggtcctac

SEQ ID NO: 18309 - DNA, 23 bp, Artificial Sequence
  Synthetic
ccgttttttttttttacaccaag

SEQ ID NO: 18310 - DNA, 23 bp, Artificial Sequence
  Synthetic
ccgttttttttttttgttatcaa

SEQ ID NO: 18311 - DNA, 23 bp, Artificial Sequence
  Synthetic
ccgttttttttttttgtgacatg

SEQ ID NO: 18312 - DNA, 23 bp, Artificial Sequence
  Synthetic
ccgttttttttttttgctaaaaa

SEQ ID NO: 18313 - DNA, 23 bp, Artificial Sequence
  Synthetic
ccgttttttttttttcacaataa

SEQ ID NO: 18314 - DNA, 23 bp, Artificial Sequence
  Synthetic
ccgttttttttttttaaaagtaa

SEQ ID NO: 18315 - DNA, 23 bp, Artificial Sequence
  Synthetic
ccgttttttttttttaaaagcaa

SEQ ID NO: 18316 - DNA, 23 bp, Artificial Sequence
  Synthetic
ccgttttttttttttaaaagtaa

SEQ ID NO: 18317 - DNA, 23 bp, Artificial Sequence
  Synthetic
ccgttttttttttttaaaagaaa

SEQ ID NO: 18318 - DNA, 23 bp, Artificial Sequence
  Synthetic
ccgttttttttttttagctcatc

SEQ ID NO: 18319 - DNA, 23 bp, Artificial Sequence
  Synthetic
ccgttttttttttttgcctgagg

SEQ ID NO: 18320 - DNA, 23 bp, Artificial Sequence
  Synthetic
ccgttttttttttttaaaccaag

SEQ ID NO: 18321 - DNA, 23 bp, Artificial Sequence
  Synthetic
ccgttttttttttttaaaccaag

SEQ ID NO: 18322 - DNA, 23 bp, Artificial Sequence
  Synthetic
ccgttttttttttttaaccagtc

SEQ ID NO: 18323 - DNA, 23 bp, Artificial Sequence
  Synthetic
ccgttttttttttttaacaaaat

SEQ ID NO: 18324 - DNA, 23 bp, Artificial Sequence
  Synthetic
ccgttttttttttttggctgagt

SEQ ID NO: 18325 - DNA, 23 bp, Artificial Sequence
  Synthetic
ccgttttttttttttagaggttc

SEQ ID NO: 18326 - DNA, 23 bp, Artificial Sequence
  Synthetic
ccgttttttttttttattacaat

SEQ ID NO: 18327 - DNA, 23 bp, Artificial Sequence
  Synthetic
ccgttttttttttttacaaggcc

SEQ ID NO: 18328 - DNA, 23 bp, Artificial Sequence
  Synthetic
ccgttttttttttttgtacagca

SEQ ID NO: 18329 - DNA, 23 bp, Artificial Sequence
  Synthetic
ccgttttttttttttgcatattt

SEQ ID NO: 18330 - DNA, 23 bp, Artificial Sequence
  Synthetic
ccgttttttttttttcggccggc

SEQ ID NO: 18331 - DNA, 23 bp, Artificial Sequence
  Synthetic
ccgttttttttttttcaaggatc

SEQ ID NO: 18332 - DNA, 23 bp, Artificial Sequence
  Synthetic
ccgttttttttttttaaatggta

SEQ ID NO: 18333 - DNA, 23 bp, Artificial Sequence
  Synthetic
ccgttttttttttttgaaacgta

SEQ ID NO: 18334 - DNA, 23 bp, Artificial Sequence
  Synthetic
ccgttttttttttttctgctgac

SEQ ID NO: 18335 - DNA, 23 bp, Artificial Sequence
  Synthetic
ccgttttttttttttacagacat

SEQ ID NO: 18336 - DNA, 23 bp, Artificial Sequence
  Synthetic
ccgttttttttttttggatcaca

SEQ ID NO: 18337 - DNA, 23 bp, Artificial Sequence
  Synthetic
ccgttttttttttttgtcctgga

SEQ ID NO: 18338 - DNA, 23 bp, Artificial Sequence
  Synthetic
ccgttttttttttttgtatacat

SEQ ID NO: 18339 - DNA, 23 bp, Artificial Sequence
  Synthetic
ccgttttttttttttccaggatt

SEQ ID NO: 18340 - DNA, 23 bp, Artificial Sequence
  Synthetic
ccgttttttttttttaaaggtaa

SEQ ID NO: 18341 - DNA, 23 bp, Artificial Sequence
  Synthetic
ccgttttttttttttactcagat

SEQ ID NO: 18342 - DNA, 23 bp, Artificial Sequence
  Synthetic
ccgttttttttttttgccaccgc

SEQ ID NO: 18343 - DNA, 23 bp, Artificial Sequence
  Synthetic
ccgttttttttttttatcagtta

SEQ ID NO: 18344 - DNA, 23 bp, Artificial Sequence
  Synthetic
ccgttttttttttttggtgtgtg

SEQ ID NO: 18345 - DNA, 23 bp, Artificial Sequence
  Synthetic
ccgttttttttttttcctgtcca

SEQ ID NO: 18346 - DNA, 23 bp, Artificial Sequence
  Synthetic
ccgttttttttttttaagacgtg

SEQ ID NO: 18347 - DNA, 23 bp, Artificial Sequence
  Synthetic
ccgttttttttttttggtaccaa

SEQ ID NO: 18348 - DNA, 23 bp, Artificial Sequence
  Synthetic
ccgttttttttttttaatcctag

SEQ ID NO: 18349 - DNA, 23 bp, Artificial Sequence
  Synthetic
ccgttttttttttttgcggttta

SEQ ID NO: 18350 - DNA, 23 bp, Artificial Sequence
  Synthetic
ccgttttttttttttaatgattc

SEQ ID NO: 18351 - DNA, 23 bp, Artificial Sequence
  Synthetic
ccgttttttttttttgatctaga

SEQ ID NO: 18352 - DNA, 23 bp, Artificial Sequence
  Synthetic
ccgttttttttttttaactggtt

SEQ ID NO: 18353 - DNA, 23 bp, Artificial Sequence
  Synthetic
ccgttttttttttttatgggacc

SEQ ID NO: 18354 - DNA, 23 bp, Artificial Sequence
  Synthetic
ccgttttttttttttagtcccag

SEQ ID NO: 18355 - DNA, 23 bp, Artificial Sequence
  Synthetic
ccgttttttttttttcatacaga

SEQ ID NO: 18356 - DNA, 23 bp, Artificial Sequence
  Synthetic
ccgttttttttttttacctaaaa

SEQ ID NO: 18357 - DNA, 23 bp, Artificial Sequence
  Synthetic
ccgttttttttttttactcatca

SEQ ID NO: 18358 - DNA, 23 bp, Artificial Sequence
  Synthetic
ccgttttttttttttaacccatt

SEQ ID NO: 18359 - DNA, 23 bp, Artificial Sequence
  Synthetic
ccgttttttttttttggaaccgg

SEQ ID NO: 18360 - DNA, 23 bp, Artificial Sequence
  Synthetic
ccgttttttttttttcactttta

SEQ ID NO: 18361 - DNA, 23 bp, Artificial Sequence
  Synthetic
ccgttttttttttttaatgagaa

SEQ ID NO: 18362 - DNA, 23 bp, Artificial Sequence
  Synthetic
ccgttttttttttttatcatcgc

SEQ ID NO: 18363 - DNA, 23 bp, Artificial Sequence
  Synthetic
ccgttttttttttttgagcaatg

SEQ ID NO: 18364 - DNA, 23 bp, Artificial Sequence
  Synthetic
ccgttttttttttttagtcacag

SEQ ID NO: 18365 - DNA, 23 bp, Artificial Sequence
  Synthetic
ccgttttttttttttacacacca

SEQ ID NO: 18366 - DNA, 23 bp, Artificial Sequence
  Synthetic
ccgttttttttttttcgaggagc

SEQ ID NO: 18367 - DNA, 23 bp, Artificial Sequence
  Synthetic
ccgttttttttttttagtggtca

SEQ ID NO: 18368 - DNA, 23 bp, Artificial Sequence
  Synthetic
ccgttttttttttttcgatgaca

SEQ ID NO: 18369 - DNA, 23 bp, Artificial Sequence
  Synthetic
ccgttttttttttttataaactg

SEQ ID NO: 18370 - DNA, 23 bp, Artificial Sequence
  Synthetic
ccgttttttttttttgcaaggct

SEQ ID NO: 18371 - DNA, 23 bp, Artificial Sequence
  Synthetic
ccgttttttttttttctccaaca

SEQ ID NO: 18372 - DNA, 23 bp, Artificial Sequence
  Synthetic
ccgttttttttttttgccgcagc

SEQ ID NO: 18373 - DNA, 23 bp, Artificial Sequence
  Synthetic
ccgttttttttttttaaaagtaa

SEQ ID NO: 18374 - DNA, 23 bp, Artificial Sequence
  Synthetic
ccgttttttttttttctgaattc

SEQ ID NO: 18375 - DNA, 23 bp, Artificial Sequence
  Synthetic
ccgttttttttttttgagaaggc

SEQ ID NO: 18376 - DNA, 23 bp, Artificial Sequence
  Synthetic
ccgttttttttttttgattttca

SEQ ID NO: 18377 - DNA, 23 bp, Artificial Sequence
  Synthetic
ccgttttttttttttagatctgg

SEQ ID NO: 18378 - DNA, 23 bp, Artificial Sequence
  Synthetic
ccgttttttttttttggagctgt

SEQ ID NO: 18379 - DNA, 23 bp, Artificial Sequence
  Synthetic
ccgttttttttttttagatgaga

SEQ ID NO: 18380 - DNA, 23 bp, Artificial Sequence
  Synthetic
ccgttttttttttttcagcacac

SEQ ID NO: 18381 - DNA, 23 bp, Artificial Sequence
  Synthetic
ccgttttttttttttagaccccg

SEQ ID NO: 18382 - DNA, 23 bp, Artificial Sequence
  Synthetic
ccgttttttttttttggagctca

SEQ ID NO: 18383 - DNA, 23 bp, Artificial Sequence
  Synthetic
ccgttttttttttttcaaagaag

SEQ ID NO: 18384 - DNA, 23 bp, Artificial Sequence
  Synthetic
ccgttttttttttttacctggca

SEQ ID NO: 18385 - DNA, 23 bp, Artificial Sequence
  Synthetic
ccgttttttttttttagggagac

SEQ ID NO: 18386 - DNA, 23 bp, Artificial Sequence
  Synthetic
ccgttttttttttttgtcactga

SEQ ID NO: 18387 - DNA, 23 bp, Artificial Sequence
  Synthetic
ccgttttttttttttcaccttca

SEQ ID NO: 18388 - DNA, 23 bp, Artificial Sequence
  Synthetic
ccgttttttttttttcagaagga

SEQ ID NO: 18389 - DNA, 23 bp, Artificial Sequence
  Synthetic
ccgttttttttttttgggcacaa

SEQ ID NO: 18390 - DNA, 23 bp, Artificial Sequence
  Synthetic
ccgttttttttttttatatctat

SEQ ID NO: 18391 - DNA, 23 bp, Artificial Sequence
  Synthetic
ccgttttttttttttgtaagcgc

SEQ ID NO: 18392 - DNA, 23 bp, Artificial Sequence
  Synthetic
ccgttttttttttttccaacctc

SEQ ID NO: 18393 - DNA, 23 bp, Artificial Sequence
  Synthetic
ccgttttttttttttccaacagc

SEQ ID NO: 18394 - DNA, 23 bp, Artificial Sequence
  Synthetic
ccgttttttttttttacacaagg

SEQ ID NO: 18395 - DNA, 23 bp, Artificial Sequence
  Synthetic
ccgttttttttttttgactatag

SEQ ID NO: 18396 - DNA, 23 bp, Artificial Sequence
  Synthetic
ccgttttttttttttgacatttt

SEQ ID NO: 18397 - DNA, 23 bp, Artificial Sequence
  Synthetic
ccgttttttttttttcttttctt

SEQ ID NO: 18398 - DNA, 23 bp, Artificial Sequence
  Synthetic
ccgttttttttttttactgccac

SEQ ID NO: 18399 - DNA, 23 bp, Artificial Sequence
  Synthetic
ccgttttttttttttgggcttac

SEQ ID NO: 18400 - DNA, 23 bp, Artificial Sequence
  Synthetic
ccgttttttttttttcttccctg

SEQ ID NO: 18401 - DNA, 23 bp, Artificial Sequence
  Synthetic
ccgttttttttttttgaggtctg

SEQ ID NO: 18402 - DNA, 23 bp, Artificial Sequence
  Synthetic
ccgttttttttttttcacaggaa

SEQ ID NO: 18403 - DNA, 23 bp, Artificial Sequence
  Synthetic
ccgttttttttttttggtagata

SEQ ID NO: 18404 - DNA, 23 bp, Artificial Sequence
  Synthetic
ccgttttttttttttcaaagttg

SEQ ID NO: 18405 - DNA, 23 bp, Artificial Sequence
  Synthetic
ccgttttttttttttacattgtt

SEQ ID NO: 18406 - DNA, 23 bp, Artificial Sequence
  Synthetic
ccgttttttttttttcgggcggg

SEQ ID NO: 18407 - DNA, 23 bp, Artificial Sequence
  Synthetic
ccgttttttttttttgcagagcc

SEQ ID NO: 18408 - DNA, 23 bp, Artificial Sequence
  Synthetic
ccgttttttttttttgccgccac

SEQ ID NO: 18409 - DNA, 23 bp, Artificial Sequence
  Synthetic
ccgttttttttttttagcgctcg

SEQ ID NO: 18410 - DNA, 23 bp, Artificial Sequence
  Synthetic
ccgttttttttttttaggcaggt

SEQ ID NO: 18411 - DNA, 23 bp, Artificial Sequence
  Synthetic
ccgttttttttttttggtgactc

SEQ ID NO: 18412 - DNA, 23 bp, Artificial Sequence
  Synthetic
ccgttttttttttttagacacat

SEQ ID NO: 18413 - DNA, 23 bp, Artificial Sequence
  Synthetic
ccgttttttttttttcctgagct

SEQ ID NO: 18414 - DNA, 23 bp, Artificial Sequence
  Synthetic
ccgttttttttttttctaagaaa

SEQ ID NO: 18415 - DNA, 23 bp, Artificial Sequence
  Synthetic
ccgttttttttttttgcagtacc

SEQ ID NO: 18416 - DNA, 23 bp, Artificial Sequence
  Synthetic
ccgttttttttttttctcagagg

SEQ ID NO: 18417 - DNA, 23 bp, Artificial Sequence
  Synthetic
ccgttttttttttttaggaagtg

SEQ ID NO: 18418 - DNA, 23 bp, Artificial Sequence
  Synthetic
ccgttttttttttttcagtgccc

SEQ ID NO: 18419 - DNA, 23 bp, Artificial Sequence
  Synthetic
ccgttttttttttttctcttgaa

SEQ ID NO: 18420 - DNA, 23 bp, Artificial Sequence
  Synthetic
ccgttttttttttttctgagagc

SEQ ID NO: 18421 - DNA, 23 bp, Artificial Sequence
  Synthetic
ccgttttttttttttaaagtcaa

SEQ ID NO: 18422 - DNA, 23 bp, Artificial Sequence
  Synthetic
ccgttttttttttttacaaccct

SEQ ID NO: 18423 - DNA, 23 bp, Artificial Sequence
  Synthetic
ccgttttttttttttagtagaga

SEQ ID NO: 18424 - DNA, 23 bp, Artificial Sequence
  Synthetic
ccgttttttttttttacatgttc

SEQ ID NO: 18425 - DNA, 23 bp, Artificial Sequence
  Synthetic
ccgttttttttttttagaggtta

SEQ ID NO: 18426 - DNA, 23 bp, Artificial Sequence
  Synthetic
ccgttttttttttttaggttgac

SEQ ID NO: 18427 - DNA, 23 bp, Artificial Sequence
  Synthetic
ccgttttttttttttagagaggg

SEQ ID NO: 18428 - DNA, 23 bp, Artificial Sequence
  Synthetic
ccgttttttttttttcaacggac

SEQ ID NO: 18429 - DNA, 23 bp, Artificial Sequence
  Synthetic
ccgttttttttttttggaccctc

SEQ ID NO: 18430 - DNA, 23 bp, Artificial Sequence
  Synthetic
ccgttttttttttttactccgat

SEQ ID NO: 18431 - DNA, 23 bp, Artificial Sequence
  Synthetic
ccgttttttttttttgcgcaggc

SEQ ID NO: 18432 - DNA, 23 bp, Artificial Sequence
  Synthetic
ccgttttttttttttctgggcca

SEQ ID NO: 18433 - DNA, 23 bp, Artificial Sequence
  Synthetic
ccgttttttttttttggtcccgc

SEQ ID NO: 18434 - DNA, 23 bp, Artificial Sequence
  Synthetic
ccgttttttttttttgtgggccg

SEQ ID NO: 18435 - DNA, 23 bp, Artificial Sequence
  Synthetic
ccgttttttttttttctccagcc

SEQ ID NO: 18436 - DNA, 23 bp, Artificial Sequence
  Synthetic
ccgttttttttttttacaaaatc

SEQ ID NO: 18437 - DNA, 23 bp, Artificial Sequence
  Synthetic
ccgttttttttttttagtggacc

SEQ ID NO: 18438 - DNA, 23 bp, Artificial Sequence
  Synthetic
ccgttttttttttttcaccttcc

SEQ ID NO: 18439 - DNA, 23 bp, Artificial Sequence
  Synthetic
ccgttttttttttttgaggctgt

SEQ ID NO: 18440 - DNA, 23 bp, Artificial Sequence
  Synthetic
ccgttttttttttttaaaccatg

SEQ ID NO: 18441 - DNA, 23 bp, Artificial Sequence
  Synthetic
ccgttttttttttttgctcagac

SEQ ID NO: 18442 - DNA, 23 bp, Artificial Sequence
  Synthetic
ccgttttttttttttagcagttt

SEQ ID NO: 18443 - DNA, 23 bp, Artificial Sequence
  Synthetic
ccgttttttttttttactccgta

SEQ ID NO: 18444 - DNA, 23 bp, Artificial Sequence
  Synthetic
ccgttttttttttttccaagacc

SEQ ID NO: 18445 - DNA, 23 bp, Artificial Sequence
  Synthetic
ccgttttttttttttctcagaac

SEQ ID NO: 18446 - DNA, 23 bp, Artificial Sequence
  Synthetic
ccgttttttttttttccctgaca

SEQ ID NO: 18447 - DNA, 23 bp, Artificial Sequence
  Synthetic
ccgttttttttttttgattccgc

SEQ ID NO: 18448 - DNA, 23 bp, Artificial Sequence
  Synthetic
ccgttttttttttttaaggatga

SEQ ID NO: 18449 - DNA, 23 bp, Artificial Sequence
  Synthetic
ccgttttttttttttacagctag

SEQ ID NO: 18450 - DNA, 23 bp, Artificial Sequence
  Synthetic
ccgttttttttttttcggttatc

SEQ ID NO: 18451 - DNA, 23 bp, Artificial Sequence
  Synthetic
ccgttttttttttttggccggga

SEQ ID NO: 18452 - DNA, 23 bp, Artificial Sequence
  Synthetic
ccgttttttttttttggccggga

SEQ ID NO: 18453 - DNA, 23 bp, Artificial Sequence
  Synthetic
ccgttttttttttttcctgcacg

SEQ ID NO: 18454 - DNA, 23 bp, Artificial Sequence
  Synthetic
ccgttttttttttttcaataaat

SEQ ID NO: 18455 - DNA, 23 bp, Artificial Sequence
  Synthetic
ccgttttttttttttaaaaatgt

SEQ ID NO: 18456 - DNA, 23 bp, Artificial Sequence
  Synthetic
ccgttttttttttttcaatacaa

SEQ ID NO: 18457 - DNA, 23 bp, Artificial Sequence
  Synthetic
ccgttttttttttttcaagatcg

SEQ ID NO: 18458 - DNA, 23 bp, Artificial Sequence
  Synthetic
ccgttttttttttttcaaggtcg

SEQ ID NO: 18459 - DNA, 23 bp, Artificial Sequence
  Synthetic
ccgttttttttttttcacttccc

SEQ ID NO: 18460 - DNA, 23 bp, Artificial Sequence
  Synthetic
ccgttttttttttttacacccag

SEQ ID NO: 18461 - DNA, 23 bp, Artificial Sequence
  Synthetic
ccgttttttttttttcactcggg

SEQ ID NO: 18462 - DNA, 23 bp, Artificial Sequence
  Synthetic
ccgttttttttttttcactcggg

SEQ ID NO: 18463 - DNA, 23 bp, Artificial Sequence
  Synthetic
ccgttttttttttttgacacagg

SEQ ID NO: 18464 - DNA, 23 bp, Artificial Sequence
  Synthetic
ccgttttttttttttgagaggaa

SEQ ID NO: 18465 - DNA, 23 bp, Artificial Sequence
  Synthetic
ccgttttttttttttgatcgacc

SEQ ID NO: 18466 - DNA, 23 bp, Artificial Sequence
  Synthetic
ccgttttttttttttctgccgtc

SEQ ID NO: 18467 - DNA, 23 bp, Artificial Sequence
  Synthetic
ccgttttttttttttacattctg

SEQ ID NO: 18468 - DNA, 23 bp, Artificial Sequence
  Synthetic
ccgttttttttttttgctaggcc

SEQ ID NO: 18469 - DNA, 23 bp, Artificial Sequence
  Synthetic
ccgttttttttttttagagtact

SEQ ID NO: 18470 - DNA, 23 bp, Artificial Sequence
  Synthetic
ccgttttttttttttggcaagtt

SEQ ID NO: 18471 - DNA, 23 bp, Artificial Sequence
  Synthetic
ccgttttttttttttaacagccc

SEQ ID NO: 18472 - DNA, 23 bp, Artificial Sequence
  Synthetic
ccgttttttttttttgatggatt

SEQ ID NO: 18473 - DNA, 23 bp, Artificial Sequence
  Synthetic
ccgttttttttttttcgccagca

SEQ ID NO: 18474 - DNA, 23 bp, Artificial Sequence
  Synthetic
ccgttttttttttttgctctctc

SEQ ID NO: 18475 - DNA, 23 bp, Artificial Sequence
  Synthetic
ccgttttttttttttgcagctgc

SEQ ID NO: 18476 - DNA, 23 bp, Artificial Sequence
  Synthetic
ccgttttttttttttcggggttt

SEQ ID NO: 18477 - DNA, 23 bp, Artificial Sequence
  Synthetic
ccgttttttttttttcaagttag

SEQ ID NO: 18478 - DNA, 23 bp, Artificial Sequence
  Synthetic
ccgttttttttttttcaaaccat

SEQ ID NO: 18479 - DNA, 23 bp, Artificial Sequence
  Synthetic
ccgttttttttttttccaatatt

SEQ ID NO: 18480 - DNA, 23 bp, Artificial Sequence
  Synthetic
ccgttttttttttttaagtgcct

SEQ ID NO: 18481 - DNA, 23 bp, Artificial Sequence
  Synthetic
ccgttttttttttttacctgcac

SEQ ID NO: 18482 - DNA, 23 bp, Artificial Sequence
  Synthetic
ccgttttttttttttgcactaga

SEQ ID NO: 18483 - DNA, 23 bp, Artificial Sequence
  Synthetic
ccgttttttttttttgttttgca

SEQ ID NO: 18484 - DNA, 23 bp, Artificial Sequence
  Synthetic
ccgttttttttttttgttttgca

SEQ ID NO: 18485 - DNA, 23 bp, Artificial Sequence
  Synthetic
ccgttttttttttttctgcacta

SEQ ID NO: 18486 - DNA, 23 bp, Artificial Sequence
  Synthetic
ccgttttttttttttcagttgcc

SEQ ID NO: 18487 - DNA, 23 bp, Artificial Sequence
  Synthetic
ccgttttttttttttatggttag

SEQ ID NO: 18488 - DNA, 23 bp, Artificial Sequence
  Synthetic
ccgttttttttttttagttcttc

SEQ ID NO: 18489 - DNA, 23 bp, Artificial Sequence
  Synthetic
ccgttttttttttttaaatccct

SEQ ID NO: 18490 - DNA, 23 bp, Artificial Sequence
  Synthetic
ccgttttttttttttcggaactt

SEQ ID NO: 18491 - DNA, 23 bp, Artificial Sequence
  Synthetic
ccgttttttttttttaggccggg

SEQ ID NO: 18492 - DNA, 23 bp, Artificial Sequence
  Synthetic
ccgttttttttttttcaagttcg

SEQ ID NO: 18493 - DNA, 23 bp, Artificial Sequence
  Synthetic
ccgttttttttttttagttatca

SEQ ID NO: 18494 - DNA, 23 bp, Artificial Sequence
  Synthetic
ccgttttttttttttagccctgt

SEQ ID NO: 18495 - DNA, 23 bp, Artificial Sequence
  Synthetic
ccgttttttttttttaggagtct

SEQ ID NO: 18496 - DNA, 23 bp, Artificial Sequence
  Synthetic
ccgttttttttttttgcactgtc

SEQ ID NO: 18497 - DNA, 23 bp, Artificial Sequence
  Synthetic
ccgttttttttttttagccctgt

SEQ ID NO: 18498 - DNA, 23 bp, Artificial Sequence
  Synthetic
ccgttttttttttttcattcacc

SEQ ID NO: 18499 - DNA, 23 bp, Artificial Sequence
  Synthetic
ccgttttttttttttcaagttag

SEQ ID NO: 18500 - DNA, 23 bp, Artificial Sequence
  Synthetic
ccgttttttttttttccaagctc

SEQ ID NO: 18501 - DNA, 23 bp, Artificial Sequence
  Synthetic
ccgttttttttttttagctggtt

SEQ ID NO: 18502 - DNA, 23 bp, Artificial Sequence
  Synthetic
ccgttttttttttttcataggaa

SEQ ID NO: 18503 - DNA, 23 bp, Artificial Sequence
  Synthetic
ccgttttttttttttacacgtgc

SEQ ID NO: 18504 - DNA, 23 bp, Artificial Sequence
  Synthetic
ccgttttttttttttgctacagt

SEQ ID NO: 18505 - DNA, 23 bp, Artificial Sequence
  Synthetic
ccgttttttttttttcaaaccat

SEQ ID NO: 18506 - DNA, 23 bp, Artificial Sequence
  Synthetic
ccgttttttttttttaaccatga

SEQ ID NO: 18507 - DNA, 23 bp, Artificial Sequence
  Synthetic
ccgttttttttttttccaatatt

SEQ ID NO: 18508 - DNA, 23 bp, Artificial Sequence
  Synthetic
ccgttttttttttttaagtgcct

SEQ ID NO: 18509 - DNA, 23 bp, Artificial Sequence
  Synthetic
ccgttttttttttttacctgcac

SEQ ID NO: 18510 - DNA, 23 bp, Artificial Sequence
  Synthetic
ccgttttttttttttgcactaga

SEQ ID NO: 18511 - DNA, 23 bp, Artificial Sequence
  Synthetic
ccgttttttttttttcaccgaca

SEQ ID NO: 18512 - DNA, 23 bp, Artificial Sequence
  Synthetic
ccgttttttttttttacaatcaa

SEQ ID NO: 18513 - DNA, 23 bp, Artificial Sequence
  Synthetic
ccgttttttttttttcccaccga

SEQ ID NO: 18514 - DNA, 23 bp, Artificial Sequence
  Synthetic
ccgttttttttttttcaacaaca

SEQ ID NO: 18515 - DNA, 23 bp, Artificial Sequence
  Synthetic
ccgttttttttttttagctccct

SEQ ID NO: 18516 - DNA, 23 bp, Artificial Sequence
  Synthetic
ccgttttttttttttacaggtag

SEQ ID NO: 18517 - DNA, 23 bp, Artificial Sequence
  Synthetic
ccgttttttttttttgttttgca

SEQ ID NO: 18518 - DNA, 23 bp, Artificial Sequence
  Synthetic
ccgttttttttttttgttttgca

SEQ ID NO: 18519 - DNA, 23 bp, Artificial Sequence
  Synthetic
ccgttttttttttttctgcacta

SEQ ID NO: 18520 - DNA, 23 bp, Artificial Sequence
  Synthetic
ccgttttttttttttgactccgg

SEQ ID NO: 18521 - DNA, 23 bp, Artificial Sequence
  Synthetic
ccgttttttttttttatggttag

SEQ ID NO: 18522 - DNA, 23 bp, Artificial Sequence
  Synthetic
ccgttttttttttttagttcttc

SEQ ID NO: 18523 - DNA, 23 bp, Artificial Sequence
  Synthetic
ccgttttttttttttgaccgaga

SEQ ID NO: 18524 - DNA, 23 bp, Artificial Sequence
  Synthetic
ccgttttttttttttcctatcct

SEQ ID NO: 18525 - DNA, 23 bp, Artificial Sequence
  Synthetic
ccgttttttttttttaatagact

SEQ ID NO: 18526 - DNA, 23 bp, Artificial Sequence
  Synthetic
ccgttttttttttttccgatttc

SEQ ID NO: 18527 - DNA, 23 bp, Artificial Sequence
  Synthetic
ccgttttttttttttgatttcaa

SEQ ID NO: 18528 - DNA, 23 bp, Artificial Sequence
  Synthetic
ccgttttttttttttgagtgtag

SEQ ID NO: 18529 - DNA, 23 bp, Artificial Sequence
  Synthetic
ccgttttttttttttgagagtgt

SEQ ID NO: 18530 - DNA, 23 bp, Artificial Sequence
  Synthetic
ccgttttttttttttaaccagct

SEQ ID NO: 18531 - DNA, 23 bp, Artificial Sequence
  Synthetic
ccgttttttttttttcaaaatca

SEQ ID NO: 18532 - DNA, 23 bp, Artificial Sequence
  Synthetic
ccgttttttttttttacagctag

SEQ ID NO: 18533 - DNA, 23 bp, Artificial Sequence
  Synthetic
ccgttttttttttttaggccggg

SEQ ID NO: 18534 - DNA, 23 bp, Artificial Sequence
  Synthetic
ccgttttttttttttcctgcacg

SEQ ID NO: 18535 - DNA, 23 bp, Artificial Sequence
  Synthetic
ccgttttttttttttcaataaat

SEQ ID NO: 18536 - DNA, 23 bp, Artificial Sequence
  Synthetic
ccgttttttttttttcaagatcg

SEQ ID NO: 18537 - DNA, 23 bp, Artificial Sequence
  Synthetic
ccgttttttttttttctatacaa

SEQ ID NO: 18538 - DNA, 23 bp, Artificial Sequence
  Synthetic
ccgttttttttttttccacacaa

SEQ ID NO: 18539 - DNA, 23 bp, Artificial Sequence
  Synthetic
ccgttttttttttttatgcaacc

SEQ ID NO: 18540 - DNA, 23 bp, Artificial Sequence
  Synthetic
ccgttttttttttttctatacaa

SEQ ID NO: 18541 - DNA, 23 bp, Artificial Sequence
  Synthetic
ccgttttttttttttgtacaaac

SEQ ID NO: 18542 - DNA, 23 bp, Artificial Sequence
  Synthetic
ccgttttttttttttagcacaaa

SEQ ID NO: 18543 - DNA, 23 bp, Artificial Sequence
  Synthetic
ccgttttttttttttatacttct

SEQ ID NO: 18544 - DNA, 23 bp, Artificial Sequence
  Synthetic
ccgttttttttttttaagttcgg

SEQ ID NO: 18545 - DNA, 23 bp, Artificial Sequence
  Synthetic
ccgttttttttttttagttatca

SEQ ID NO: 18546 - DNA, 23 bp, Artificial Sequence
  Synthetic
ccgttttttttttttagccctgt

SEQ ID NO: 18547 - DNA, 23 bp, Artificial Sequence
  Synthetic
ccgttttttttttttagccctgt

SEQ ID NO: 18548 - DNA, 23 bp, Artificial Sequence
  Synthetic
ccgttttttttttttcaaattcg

SEQ ID NO: 18549 - DNA, 23 bp, Artificial Sequence
  Synthetic
ccgttttttttttttaaattcgg

SEQ ID NO: 18550 - DNA, 23 bp, Artificial Sequence
  Synthetic
ccgttttttttttttacaaacac

SEQ ID NO: 18551 - DNA, 23 bp, Artificial Sequence
  Synthetic
ccgttttttttttttcattcacc

SEQ ID NO: 18552 - DNA, 23 bp, Artificial Sequence
  Synthetic
ccgttttttttttttcaagttag

SEQ ID NO: 18553 - DNA, 23 bp, Artificial Sequence
  Synthetic
ccgttttttttttttagagaccg

SEQ ID NO: 18554 - DNA, 23 bp, Artificial Sequence
  Synthetic
ccgttttttttttttcaagccca

SEQ ID NO: 18555 - DNA, 23 bp, Artificial Sequence
  Synthetic
ccgttttttttttttcccttttt

SEQ ID NO: 18556 - DNA, 23 bp, Artificial Sequence
  Synthetic
ccgttttttttttttaccatggc

SEQ ID NO: 18557 - DNA, 23 bp, Artificial Sequence
  Synthetic
ccgttttttttttttagctggtt

SEQ ID NO: 18558 - DNA, 23 bp, Artificial Sequence
  Synthetic
ccgttttttttttttcataggaa

SEQ ID NO: 18559 - DNA, 23 bp, Artificial Sequence
  Synthetic
ccgttttttttttttcataggaa

SEQ ID NO: 18560 - DNA, 23 bp, Artificial Sequence
  Synthetic
ccgttttttttttttcgcgtatt

SEQ ID NO: 18561 - DNA, 23 bp, Artificial Sequence
  Synthetic
ccgttttttttttttcacaacac

SEQ ID NO: 18562 - DNA, 23 bp, Artificial Sequence
  Synthetic
ccgttttttttttttatctttac

SEQ ID NO: 18563 - DNA, 23 bp, Artificial Sequence
  Synthetic
ccgttttttttttttataaagta

SEQ ID NO: 18564 - DNA, 23 bp, Artificial Sequence
  Synthetic
ccgttttttttttttagctacag

SEQ ID NO: 18565 - DNA, 23 bp, Artificial Sequence
  Synthetic
ccgttttttttttttagtacatc

SEQ ID NO: 18566 - DNA, 23 bp, Artificial Sequence
  Synthetic
ccgttttttttttttggattcct

SEQ ID NO: 18567 - DNA, 23 bp, Artificial Sequence
  Synthetic
ccgttttttttttttcaagttct

SEQ ID NO: 18568 - DNA, 23 bp, Artificial Sequence
  Synthetic
ccgttttttttttttcaaaccat

SEQ ID NO: 18569 - DNA, 23 bp, Artificial Sequence
  Synthetic
ccgttttttttttttccaatatt

SEQ ID NO: 18570 - DNA, 23 bp, Artificial Sequence
  Synthetic
ccgttttttttttttaagtgcct

SEQ ID NO: 18571 - DNA, 23 bp, Artificial Sequence
  Synthetic
ccgttttttttttttacctgcac

SEQ ID NO: 18572 - DNA, 23 bp, Artificial Sequence
  Synthetic
ccgttttttttttttgcactaga

SEQ ID NO: 18573 - DNA, 23 bp, Artificial Sequence
  Synthetic
ccgttttttttttttcaccgaca

SEQ ID NO: 18574 - DNA, 23 bp, Artificial Sequence
  Synthetic
ccgttttttttttttcaccgaca

SEQ ID NO: 18575 - DNA, 23 bp, Artificial Sequence
  Synthetic
ccgttttttttttttcaccgaca

SEQ ID NO: 18576 - DNA, 23 bp, Artificial Sequence
  Synthetic
ccgttttttttttttagttctac

SEQ ID NO: 18577 - DNA, 23 bp, Artificial Sequence
  Synthetic
ccgttttttttttttgtgaattc

SEQ ID NO: 18578 - DNA, 23 bp, Artificial Sequence
  Synthetic
ccgttttttttttttccttatca

SEQ ID NO: 18579 - DNA, 23 bp, Artificial Sequence
  Synthetic
ccgttttttttttttgcccaaaa

SEQ ID NO: 18580 - DNA, 23 bp, Artificial Sequence
  Synthetic
ccgttttttttttttctgcaaca

SEQ ID NO: 18581 - DNA, 23 bp, Artificial Sequence
  Synthetic
ccgttttttttttttctgctttt

SEQ ID NO: 18582 - DNA, 23 bp, Artificial Sequence
  Synthetic
ccgttttttttttttggactttg

SEQ ID NO: 18583 - DNA, 23 bp, Artificial Sequence
  Synthetic
ccgttttttttttttaacaacag

SEQ ID NO: 18584 - DNA, 23 bp, Artificial Sequence
  Synthetic
ccgttttttttttttacagatag

SEQ ID NO: 18585 - DNA, 23 bp, Artificial Sequence
  Synthetic
ccgttttttttttttgttttgca

SEQ ID NO: 18586 - DNA, 23 bp, Artificial Sequence
  Synthetic
ccgttttttttttttgttttgca

SEQ ID NO: 18587 - DNA, 23 bp, Artificial Sequence
  Synthetic
ccgttttttttttttcctgcact

SEQ ID NO: 18588 - DNA, 23 bp, Artificial Sequence
  Synthetic
ccgttttttttttttatcgttac

SEQ ID NO: 18589 - DNA, 23 bp, Artificial Sequence
  Synthetic
ccgttttttttttttagcactgt

SEQ ID NO: 18590 - DNA, 23 bp, Artificial Sequence
  Synthetic
ccgttttttttttttcattacca

SEQ ID NO: 18591 - DNA, 23 bp, Artificial Sequence
  Synthetic
ccgttttttttttttatcattac

SEQ ID NO: 18592 - DNA, 23 bp, Artificial Sequence
  Synthetic
ccgttttttttttttagtggtcc

SEQ ID NO: 18593 - DNA, 23 bp, Artificial Sequence
  Synthetic
ccgttttttttttttgcatagga

SEQ ID NO: 18594 - DNA, 23 bp, Artificial Sequence
  Synthetic
ccgttttttttttttcacacttc

SEQ ID NO: 18595 - DNA, 23 bp, Artificial Sequence
  Synthetic
ccgttttttttttttgagctttt

SEQ ID NO: 18596 - DNA, 23 bp, Artificial Sequence
  Synthetic
ccgttttttttttttacatcagt

SEQ ID NO: 18597 - DNA, 23 bp, Artificial Sequence
  Synthetic
ccgttttttttttttccgtgact

SEQ ID NO: 18598 - DNA, 23 bp, Artificial Sequence
  Synthetic
ccgttttttttttttcctgtctg

SEQ ID NO: 18599 - DNA, 23 bp, Artificial Sequence
  Synthetic
ccgttttttttttttcagttgcc

SEQ ID NO: 18600 - DNA, 23 bp, Artificial Sequence
  Synthetic
ccgttttttttttttcaatcagt

SEQ ID NO: 18601 - DNA, 23 bp, Artificial Sequence
  Synthetic
ccgttttttttttttatggttag

SEQ ID NO: 18602 - DNA, 23 bp, Artificial Sequence
  Synthetic
ccgttttttttttttaattgcgt

SEQ ID NO: 18603 - DNA, 23 bp, Artificial Sequence
  Synthetic
ccgttttttttttttagttcttc

SEQ ID NO: 18604 - DNA, 23 bp, Artificial Sequence
  Synthetic
ccgttttttttttttaacccagc

SEQ ID NO: 18605 - DNA, 23 bp, Artificial Sequence
  Synthetic
ccgttttttttttttgacccagt

SEQ ID NO: 18606 - DNA, 23 bp, Artificial Sequence
  Synthetic
ccgttttttttttttggtatttg

SEQ ID NO: 18607 - DNA, 23 bp, Artificial Sequence
  Synthetic
ccgttttttttttttaatccctg

SEQ ID NO: 18608 - DNA, 23 bp, Artificial Sequence
  Synthetic
ccgttttttttttttaatccctg

SEQ ID NO: 18609 - DNA, 23 bp, Artificial Sequence
  Synthetic
ccgttttttttttttctgaactg

SEQ ID NO: 18610 - DNA, 23 bp, Artificial Sequence
  Synthetic
ccgttttttttttttgaccgaga

SEQ ID NO: 18611 - DNA, 23 bp, Artificial Sequence
  Synthetic
ccgttttttttttttggaactta

SEQ ID NO: 18612 - DNA, 23 bp, Artificial Sequence
  Synthetic
ccgttttttttttttagaactta

SEQ ID NO: 18613 - DNA, 23 bp, Artificial Sequence
  Synthetic
ccgttttttttttttcgatttca

SEQ ID NO: 18614 - DNA, 23 bp, Artificial Sequence
  Synthetic
ccgttttttttttttgatttcaa

SEQ ID NO: 18615 - DNA, 23 bp, Artificial Sequence
  Synthetic
ccgttttttttttttaaacatgg

SEQ ID NO: 18616 - DNA, 23 bp, Artificial Sequence
  Synthetic
ccgttttttttttttaaaacatg

SEQ ID NO: 18617 - DNA, 23 bp, Artificial Sequence
  Synthetic
ccgttttttttttttgaaacatg

SEQ ID NO: 18618 - DNA, 23 bp, Artificial Sequence
  Synthetic
ccgttttttttttttcaaacatg

SEQ ID NO: 18619 - DNA, 23 bp, Artificial Sequence
  Synthetic
ccgttttttttttttcagtcgag

SEQ ID NO: 18620 - DNA, 23 bp, Artificial Sequence
  Synthetic
ccgttttttttttttgctatgcc

SEQ ID NO: 18621 - DNA, 23 bp, Artificial Sequence
  Synthetic
ccgttttttttttttaacttagt

SEQ ID NO: 18622 - DNA, 23 bp, Artificial Sequence
  Synthetic
ccgttttttttttttacaaaatc

SEQ ID NO: 18623 - DNA, 23 bp, Artificial Sequence
  Synthetic
ccgttttttttttttcaaccagc

SEQ ID NO: 18624 - DNA, 23 bp, Artificial Sequence
  Synthetic
ccgttttttttttttaggatttt

SEQ ID NO: 18625 - DNA, 23 bp, Artificial Sequence
  Synthetic
ccgttttttttttttccattgct

SEQ ID NO: 18626 - DNA, 23 bp, Artificial Sequence
  Synthetic
ccgttttttttttttcgcgagcc

SEQ ID NO: 18627 - DNA, 23 bp, Artificial Sequence
  Synthetic
ccgttttttttttttccacaatc

SEQ ID NO: 18628 - DNA, 23 bp, Artificial Sequence
  Synthetic
ccgttttttttttttacggacac

SEQ ID NO: 18629 - DNA, 23 bp, Artificial Sequence
  Synthetic
ccgttttttttttttcagctaac

SEQ ID NO: 18630 - DNA, 23 bp, Artificial Sequence
  Synthetic
ccgttttttttttttcacagtaa

SEQ ID NO: 18631 - DNA, 23 bp, Artificial Sequence
  Synthetic
ccgttttttttttttacaaaatc

SEQ ID NO: 18632 - DNA, 23 bp, Artificial Sequence
  Synthetic
ccgttttttttttttacagctag

SEQ ID NO: 18633 - DNA, 23 bp, Artificial Sequence
  Synthetic
ccgttttttttttttcggttatc

SEQ ID NO: 18634 - DNA, 23 bp, Artificial Sequence
  Synthetic
ccgttttttttttttggccggga

SEQ ID NO: 18635 - DNA, 23 bp, Artificial Sequence
  Synthetic
ccgttttttttttttcctgcacg

SEQ ID NO: 18636 - DNA, 23 bp, Artificial Sequence
  Synthetic
ccgttttttttttttcaaaaatg

SEQ ID NO: 18637 - DNA, 23 bp, Artificial Sequence
  Synthetic
ccgttttttttttttcgcacagt

SEQ ID NO: 18638 - DNA, 23 bp, Artificial Sequence
  Synthetic
ccgttttttttttttgactaccg

SEQ ID NO: 18639 - DNA, 23 bp, Artificial Sequence
  Synthetic
ccgttttttttttttgctattct

SEQ ID NO: 18640 - DNA, 23 bp, Artificial Sequence
  Synthetic
ccgttttttttttttgggagagg

SEQ ID NO: 18641 - DNA, 23 bp, Artificial Sequence
  Synthetic
ccgttttttttttttagggttcc

SEQ ID NO: 18642 - DNA, 23 bp, Artificial Sequence
  Synthetic
ccgttttttttttttcatgctgt

SEQ ID NO: 18643 - DNA, 23 bp, Artificial Sequence
  Synthetic
ccgttttttttttttagtagacg

SEQ ID NO: 18644 - DNA, 23 bp, Artificial Sequence
  Synthetic
ccgttttttttttttgtcatttc

SEQ ID NO: 18645 - DNA, 23 bp, Artificial Sequence
  Synthetic
ccgttttttttttttaatctcgt

SEQ ID NO: 18646 - DNA, 23 bp, Artificial Sequence
  Synthetic
ccgttttttttttttattgttcc

SEQ ID NO: 18647 - DNA, 23 bp, Artificial Sequence
  Synthetic
ccgttttttttttttaggaagta

SEQ ID NO: 18648 - DNA, 23 bp, Artificial Sequence
  Synthetic
ccgttttttttttttagaggggg

SEQ ID NO: 18649 - DNA, 23 bp, Artificial Sequence
  Synthetic
ccgttttttttttttgcgcaact

SEQ ID NO: 18650 - DNA, 23 bp, Artificial Sequence
  Synthetic
ccgttttttttttttaataacac

SEQ ID NO: 18651 - DNA, 23 bp, Artificial Sequence
  Synthetic
ccgttttttttttttgacgaccc

SEQ ID NO: 18652 - DNA, 23 bp, Artificial Sequence
  Synthetic
ccgttttttttttttaaccacct

SEQ ID NO: 18653 - DNA, 23 bp, Artificial Sequence
  Synthetic
ccgttttttttttttaaaggtgg

SEQ ID NO: 18654 - DNA, 23 bp, Artificial Sequence
  Synthetic
ccgttttttttttttgttaccgc

SEQ ID NO: 18655 - DNA, 23 bp, Artificial Sequence
  Synthetic
ccgttttttttttttccaaaccc

SEQ ID NO: 18656 - DNA, 23 bp, Artificial Sequence
  Synthetic
ccgttttttttttttaaaggtcc

SEQ ID NO: 18657 - DNA, 23 bp, Artificial Sequence
  Synthetic
ccgttttttttttttcaagttcg

SEQ ID NO: 18658 - DNA, 23 bp, Artificial Sequence
  Synthetic
ccgttttttttttttagttatca

SEQ ID NO: 18659 - DNA, 23 bp, Artificial Sequence
  Synthetic
ccgttttttttttttagccctgt

SEQ ID NO: 18660 - DNA, 23 bp, Artificial Sequence
  Synthetic
ccgttttttttttttaggagtct

SEQ ID NO: 18661 - DNA, 23 bp, Artificial Sequence
  Synthetic
ccgttttttttttttacctgcac

SEQ ID NO: 18662 - DNA, 23 bp, Artificial Sequence
  Synthetic
ccgttttttttttttgcactgtc

SEQ ID NO: 18663 - DNA, 23 bp, Artificial Sequence
  Synthetic
ccgttttttttttttagccctgt

SEQ ID NO: 18664 - DNA, 23 bp, Artificial Sequence
  Synthetic
ccgttttttttttttcattcacc

SEQ ID NO: 18665 - DNA, 23 bp, Artificial Sequence
  Synthetic
ccgttttttttttttcaagttag

SEQ ID NO: 18666 - DNA, 23 bp, Artificial Sequence
  Synthetic
ccgttttttttttttccaagctc

SEQ ID NO: 18667 - DNA, 23 bp, Artificial Sequence
  Synthetic
ccgttttttttttttaagagacc

SEQ ID NO: 18668 - DNA, 23 bp, Artificial Sequence
  Synthetic
ccgttttttttttttccttttaa

SEQ ID NO: 18669 - DNA, 23 bp, Artificial Sequence
  Synthetic
ccgttttttttttttagctggtt

SEQ ID NO: 18670 - DNA, 23 bp, Artificial Sequence
  Synthetic
ccgttttttttttttcataggaa

SEQ ID NO: 18671 - DNA, 23 bp, Artificial Sequence
  Synthetic
ccgttttttttttttatctttac

SEQ ID NO: 18672 - DNA, 23 bp, Artificial Sequence
  Synthetic
ccgttttttttttttgggattcc

SEQ ID NO: 18673 - DNA, 23 bp, Artificial Sequence
  Synthetic
ccgttttttttttttcttttgtg

SEQ ID NO: 18674 - DNA, 23 bp, Artificial Sequence
  Synthetic
ccgttttttttttttcaaaccat

SEQ ID NO: 18675 - DNA, 23 bp, Artificial Sequence
  Synthetic
ccgttttttttttttaaccatga

SEQ ID NO: 18676 - DNA, 23 bp, Artificial Sequence
  Synthetic
ccgttttttttttttccaatatt

SEQ ID NO: 18677 - DNA, 23 bp, Artificial Sequence
  Synthetic
ccgttttttttttttaagtgcct

SEQ ID NO: 18678 - DNA, 23 bp, Artificial Sequence
  Synthetic
ccgttttttttttttacctgcac

SEQ ID NO: 18679 - DNA, 23 bp, Artificial Sequence
  Synthetic
ccgttttttttttttgcactaga

SEQ ID NO: 18680 - DNA, 23 bp, Artificial Sequence
  Synthetic
ccgttttttttttttcaccgaca

SEQ ID NO: 18681 - DNA, 23 bp, Artificial Sequence
  Synthetic
ccgttttttttttttacaatcaa

SEQ ID NO: 18682 - DNA, 23 bp, Artificial Sequence
  Synthetic
ccgttttttttttttcccaccga

SEQ ID NO: 18683 - DNA, 23 bp, Artificial Sequence
  Synthetic
ccgttttttttttttcaccgaca

SEQ ID NO: 18684 - DNA, 23 bp, Artificial Sequence
  Synthetic
ccgttttttttttttagttctac

SEQ ID NO: 18685 - DNA, 23 bp, Artificial Sequence
  Synthetic
ccgttttttttttttgtgaattc

SEQ ID NO: 18686 - DNA, 23 bp, Artificial Sequence
  Synthetic
ccgttttttttttttcctccacc

SEQ ID NO: 18687 - DNA, 23 bp, Artificial Sequence
  Synthetic
ccgttttttttttttgatatcag

SEQ ID NO: 18688 - DNA, 23 bp, Artificial Sequence
  Synthetic
ccgttttttttttttctaatata

SEQ ID NO: 18689 - DNA, 23 bp, Artificial Sequence
  Synthetic
ccgttttttttttttacatggag

SEQ ID NO: 18690 - DNA, 23 bp, Artificial Sequence
  Synthetic
ccgttttttttttttaacaacat

SEQ ID NO: 18691 - DNA, 23 bp, Artificial Sequence
  Synthetic
ccgttttttttttttatttcccc

SEQ ID NO: 18692 - DNA, 23 bp, Artificial Sequence
  Synthetic
ccgttttttttttttacaggtag

SEQ ID NO: 18693 - DNA, 23 bp, Artificial Sequence
  Synthetic
ccgttttttttttttgttttgca

SEQ ID NO: 18694 - DNA, 23 bp, Artificial Sequence
  Synthetic
ccgttttttttttttgttttgca

SEQ ID NO: 18695 - DNA, 23 bp, Artificial Sequence
  Synthetic
ccgttttttttttttctgcacta

SEQ ID NO: 18696 - DNA, 23 bp, Artificial Sequence
  Synthetic
ccgttttttttttttatcattac

SEQ ID NO: 18697 - DNA, 23 bp, Artificial Sequence
  Synthetic
ccgttttttttttttacatcagt

SEQ ID NO: 18698 - DNA, 23 bp, Artificial Sequence
  Synthetic
ccgttttttttttttgcaaagga

SEQ ID NO: 18699 - DNA, 23 bp, Artificial Sequence
  Synthetic
ccgttttttttttttcctgtctg

SEQ ID NO: 18700 - DNA, 23 bp, Artificial Sequence
  Synthetic
ccgttttttttttttgtcaattc

SEQ ID NO: 18701 - DNA, 23 bp, Artificial Sequence
  Synthetic
ccgttttttttttttatggttag

SEQ ID NO: 18702 - DNA, 23 bp, Artificial Sequence
  Synthetic
ccgttttttttttttaattgcgt

SEQ ID NO: 18703 - DNA, 23 bp, Artificial Sequence
  Synthetic
ccgttttttttttttagttcttc

SEQ ID NO: 18704 - DNA, 23 bp, Artificial Sequence
  Synthetic
ccgttttttttttttagtgtcag

SEQ ID NO: 18705 - DNA, 23 bp, Artificial Sequence
  Synthetic
ccgttttttttttttaacccagc

SEQ ID NO: 18706 - DNA, 23 bp, Artificial Sequence
  Synthetic
ccgttttttttttttggtatttg

SEQ ID NO: 18707 - DNA, 23 bp, Artificial Sequence
  Synthetic
ccgttttttttttttacggaacc

SEQ ID NO: 18708 - DNA, 23 bp, Artificial Sequence
  Synthetic
ccgttttttttttttaaatccct

SEQ ID NO: 18709 - DNA, 23 bp, Artificial Sequence
  Synthetic
ccgttttttttttttcctgctga

SEQ ID NO: 18710 - DNA, 23 bp, Artificial Sequence
  Synthetic
ccgttttttttttttgaccgaga

SEQ ID NO: 18711 - DNA, 23 bp, Artificial Sequence
  Synthetic
ccgttttttttttttcctatcct

SEQ ID NO: 18712 - DNA, 23 bp, Artificial Sequence
  Synthetic
ccgttttttttttttcggaactt

SEQ ID NO: 18713 - DNA, 23 bp, Artificial Sequence
  Synthetic
ccgttttttttttttaatagact

SEQ ID NO: 18714 - DNA, 23 bp, Artificial Sequence
  Synthetic
ccgttttttttttttccgatttc

SEQ ID NO: 18715 - DNA, 23 bp, Artificial Sequence
  Synthetic
ccgttttttttttttgcaaacat

SEQ ID NO: 18716 - DNA, 23 bp, Artificial Sequence
  Synthetic
ccgttttttttttttcagtcgag

SEQ ID NO: 18717 - DNA, 23 bp, Artificial Sequence
  Synthetic
ccgttttttttttttgagtgtag

SEQ ID NO: 18718 - DNA, 23 bp, Artificial Sequence
  Synthetic
ccgttttttttttttgctatgcc

SEQ ID NO: 18719 - DNA, 23 bp, Artificial Sequence
  Synthetic
ccgttttttttttttaacttagt

SEQ ID NO: 18720 - DNA, 23 bp, Artificial Sequence
  Synthetic
ccgttttttttttttatgcaact

SEQ ID NO: 18721 - DNA, 23 bp, Artificial Sequence
  Synthetic
ccgttttttttttttaaccagct

SEQ ID NO: 18722 - DNA, 23 bp, Artificial Sequence
  Synthetic
ccgttttttttttttaggccggg

SEQ ID NO: 18723 - DNA, 23 bp, Artificial Sequence
  Synthetic
ccgttttttttttttcctgcacg

SEQ ID NO: 18724 - DNA, 23 bp, Artificial Sequence
  Synthetic
ccgttttttttttttaaaaatgt

SEQ ID NO: 18725 - DNA, 23 bp, Artificial Sequence
  Synthetic
ccgttttttttttttcaatacaa

SEQ ID NO: 18726 - DNA, 23 bp, Artificial Sequence
  Synthetic
ccgttttttttttttcaagatcg

SEQ ID NO: 18727 - DNA, 23 bp, Artificial Sequence
  Synthetic
ccgttttttttttttatacaacc

SEQ ID NO: 18728 - DNA, 23 bp, Artificial Sequence
  Synthetic
ccgttttttttttttccacacaa

SEQ ID NO: 18729 - DNA, 23 bp, Artificial Sequence
  Synthetic
ccgttttttttttttccatacaa

SEQ ID NO: 18730 - DNA, 23 bp, Artificial Sequence
  Synthetic
ccgttttttttttttatgcaacc

SEQ ID NO: 18731 - DNA, 23 bp, Artificial Sequence
  Synthetic
ccgttttttttttttaaaggcag

SEQ ID NO: 18732 - DNA, 23 bp, Artificial Sequence
  Synthetic
ccgttttttttttttatacaacc

SEQ ID NO: 18733 - DNA, 23 bp, Artificial Sequence
  Synthetic
ccgttttttttttttatacaatc

SEQ ID NO: 18734 - DNA, 23 bp, Artificial Sequence
  Synthetic
ccgttttttttttttgtacaaac

SEQ ID NO: 18735 - DNA, 23 bp, Artificial Sequence
  Synthetic
ccgttttttttttttagcacaaa

SEQ ID NO: 18736 - DNA, 23 bp, Artificial Sequence
  Synthetic
ccgttttttttttttatacttct

SEQ ID NO: 18737 - DNA, 23 bp, Artificial Sequence
  Synthetic
ccgttttttttttttcaagttcg

SEQ ID NO: 18738 - DNA, 23 bp, Artificial Sequence
  Synthetic
ccgttttttttttttagttatca

SEQ ID NO: 18739 - DNA, 23 bp, Artificial Sequence
  Synthetic
ccgttttttttttttagctatca

SEQ ID NO: 18740 - DNA, 23 bp, Artificial Sequence
  Synthetic
ccgttttttttttttagccctgt

SEQ ID NO: 18741 - DNA, 23 bp, Artificial Sequence
  Synthetic
ccgttttttttttttctgcactg

SEQ ID NO: 18742 - DNA, 23 bp, Artificial Sequence
  Synthetic
ccgttttttttttttgcactgtc

SEQ ID NO: 18743 - DNA, 23 bp, Artificial Sequence
  Synthetic
ccgttttttttttttagccctgt

SEQ ID NO: 18744 - DNA, 23 bp, Artificial Sequence
  Synthetic
ccgttttttttttttcaaattcg

SEQ ID NO: 18745 - DNA, 23 bp, Artificial Sequence
  Synthetic
ccgttttttttttttacaaattc

SEQ ID NO: 18746 - DNA, 23 bp, Artificial Sequence
  Synthetic
ccgttttttttttttaaacacca

SEQ ID NO: 18747 - DNA, 23 bp, Artificial Sequence
  Synthetic
ccgttttttttttttcattcacc

SEQ ID NO: 18748 - DNA, 23 bp, Artificial Sequence
  Synthetic
ccgttttttttttttcaggttaa

SEQ ID NO: 18749 - DNA, 23 bp, Artificial Sequence
  Synthetic
ccgttttttttttttcaagttag

SEQ ID NO: 18750 - DNA, 23 bp, Artificial Sequence
  Synthetic
ccgttttttttttttattattac

SEQ ID NO: 18751 - DNA, 23 bp, Artificial Sequence
  Synthetic
ccgttttttttttttcgtaccaa

SEQ ID NO: 18752 - DNA, 23 bp, Artificial Sequence
  Synthetic
ccgttttttttttttcaagctca

SEQ ID NO: 18753 - DNA, 23 bp, Artificial Sequence
  Synthetic
ccgttttttttttttaagagacc

SEQ ID NO: 18754 - DNA, 23 bp, Artificial Sequence
  Synthetic
ccgttttttttttttaagagacc

SEQ ID NO: 18755 - DNA, 23 bp, Artificial Sequence
  Synthetic
ccgttttttttttttctttttgg

SEQ ID NO: 18756 - DNA, 23 bp, Artificial Sequence
  Synthetic
ccgttttttttttttcaagccca

SEQ ID NO: 18757 - DNA, 23 bp, Artificial Sequence
  Synthetic
ccgttttttttttttccctttta

SEQ ID NO: 18758 - DNA, 23 bp, Artificial Sequence
  Synthetic
ccgttttttttttttccctttca

SEQ ID NO: 18759 - DNA, 23 bp, Artificial Sequence
  Synthetic
ccgttttttttttttaccatggc

SEQ ID NO: 18760 - DNA, 23 bp, Artificial Sequence
  Synthetic
ccgttttttttttttagctggtt

SEQ ID NO: 18761 - DNA, 23 bp, Artificial Sequence
  Synthetic
ccgttttttttttttgttccatt

SEQ ID NO: 18762 - DNA, 23 bp, Artificial Sequence
  Synthetic
ccgttttttttttttctggttga

SEQ ID NO: 18763 - DNA, 23 bp, Artificial Sequence
  Synthetic
ccgttttttttttttcctctggt

SEQ ID NO: 18764 - DNA, 23 bp, Artificial Sequence
  Synthetic
ccgttttttttttttcataggaa

SEQ ID NO: 18765 - DNA, 23 bp, Artificial Sequence
  Synthetic
ccgttttttttttttcataggaa

SEQ ID NO: 18766 - DNA, 23 bp, Artificial Sequence
  Synthetic
ccgttttttttttttatcatcaa

SEQ ID NO: 18767 - DNA, 23 bp, Artificial Sequence
  Synthetic
ccgttttttttttttcgcgtatt

SEQ ID NO: 18768 - DNA, 23 bp, Artificial Sequence
  Synthetic
ccgttttttttttttcacaacac

SEQ ID NO: 18769 - DNA, 23 bp, Artificial Sequence
  Synthetic
ccgttttttttttttacacgtgc

SEQ ID NO: 18770 - DNA, 23 bp, Artificial Sequence
  Synthetic
ccgttttttttttttccataggg

SEQ ID NO: 18771 - DNA, 23 bp, Artificial Sequence
  Synthetic
ccgttttttttttttgtggttct

SEQ ID NO: 18772 - DNA, 23 bp, Artificial Sequence
  Synthetic
ccgttttttttttttatctttac

SEQ ID NO: 18773 - DNA, 23 bp, Artificial Sequence
  Synthetic
ccgttttttttttttataaagta

SEQ ID NO: 18774 - DNA, 23 bp, Artificial Sequence
  Synthetic
ccgttttttttttttgtgctttc

SEQ ID NO: 18775 - DNA, 23 bp, Artificial Sequence
  Synthetic
ccgttttttttttttgctacagt

SEQ ID NO: 18776 - DNA, 23 bp, Artificial Sequence
  Synthetic
ccgttttttttttttgtacatca

SEQ ID NO: 18777 - DNA, 23 bp, Artificial Sequence
  Synthetic
ccgttttttttttttgggattcc

SEQ ID NO: 18778 - DNA, 23 bp, Artificial Sequence
  Synthetic
ccgttttttttttttcccatgga

SEQ ID NO: 18779 - DNA, 23 bp, Artificial Sequence
  Synthetic
ccgttttttttttttcctatgga

SEQ ID NO: 18780 - DNA, 23 bp, Artificial Sequence
  Synthetic
ccgttttttttttttaaagttct

SEQ ID NO: 18781 - DNA, 23 bp, Artificial Sequence
  Synthetic
ccgttttttttttttaaagttct

SEQ ID NO: 18782 - DNA, 23 bp, Artificial Sequence
  Synthetic
ccgttttttttttttagtgaaga

SEQ ID NO: 18783 - DNA, 23 bp, Artificial Sequence
  Synthetic
ccgttttttttttttctggtaca

SEQ ID NO: 18784 - DNA, 23 bp, Artificial Sequence
  Synthetic
ccgttttttttttttcaaggagc

SEQ ID NO: 18785 - DNA, 23 bp, Artificial Sequence
  Synthetic
ccgttttttttttttcaagttct

SEQ ID NO: 18786 - DNA, 23 bp, Artificial Sequence
  Synthetic
ccgttttttttttttcacttttg

SEQ ID NO: 18787 - DNA, 23 bp, Artificial Sequence
  Synthetic
ccgttttttttttttaaggcaac

SEQ ID NO: 18788 - DNA, 23 bp, Artificial Sequence
  Synthetic
ccgttttttttttttcctatcac

SEQ ID NO: 18789 - DNA, 23 bp, Artificial Sequence
  Synthetic
ccgttttttttttttcaaaccat

SEQ ID NO: 18790 - DNA, 23 bp, Artificial Sequence
  Synthetic
ccgttttttttttttaaccatga

SEQ ID NO: 18791 - DNA, 23 bp, Artificial Sequence
  Synthetic
ccgttttttttttttccaatatt

SEQ ID NO: 18792 - DNA, 23 bp, Artificial Sequence
  Synthetic
ccgttttttttttttaagtgccc

SEQ ID NO: 18793 - DNA, 23 bp, Artificial Sequence
  Synthetic
ccgttttttttttttacctgcac

SEQ ID NO: 18794 - DNA, 23 bp, Artificial Sequence
  Synthetic
ccgttttttttttttgcactaga

SEQ ID NO: 18795 - DNA, 23 bp, Artificial Sequence
  Synthetic
ccgttttttttttttcaccgaca

SEQ ID NO: 18796 - DNA, 23 bp, Artificial Sequence
  Synthetic
ccgttttttttttttacaatcaa

SEQ ID NO: 18797 - DNA, 23 bp, Artificial Sequence
  Synthetic
ccgttttttttttttcaccgaca

SEQ ID NO: 18798 - DNA, 23 bp, Artificial Sequence
  Synthetic
ccgttttttttttttcaccgaca

SEQ ID NO: 18799 - DNA, 23 bp, Artificial Sequence
  Synthetic
ccgttttttttttttagttctac

SEQ ID NO: 18800 - DNA, 23 bp, Artificial Sequence
  Synthetic
ccgttttttttttttgtgaattc

SEQ ID NO: 18801 - DNA, 23 bp, Artificial Sequence
  Synthetic
ccgttttttttttttccttatca

SEQ ID NO: 18802 - DNA, 23 bp, Artificial Sequence
  Synthetic
ccgttttttttttttactgcctt

SEQ ID NO: 18803 - DNA, 23 bp, Artificial Sequence
  Synthetic
ccgttttttttttttgcccaaaa

SEQ ID NO: 18804 - DNA, 23 bp, Artificial Sequence
  Synthetic
ccgttttttttttttggctgcaa

SEQ ID NO: 18805 - DNA, 23 bp, Artificial Sequence
  Synthetic
ccgttttttttttttcctccacc

SEQ ID NO: 18806 - DNA, 23 bp, Artificial Sequence
  Synthetic
ccgttttttttttttgatatcag

SEQ ID NO: 18807 - DNA, 23 bp, Artificial Sequence
  Synthetic
ccgttttttttttttctaatata

SEQ ID NO: 18808 - DNA, 23 bp, Artificial Sequence
  Synthetic
ccgttttttttttttctgctttt

SEQ ID NO: 18809 - DNA, 23 bp, Artificial Sequence
  Synthetic
ccgttttttttttttaattcata

SEQ ID NO: 18810 - DNA, 23 bp, Artificial Sequence
  Synthetic
ccgttttttttttttggactttg

SEQ ID NO: 18811 - DNA, 23 bp, Artificial Sequence
  Synthetic
ccgttttttttttttacatggag

SEQ ID NO: 18812 - DNA, 23 bp, Artificial Sequence
  Synthetic
ccgttttttttttttcaatattt

SEQ ID NO: 18813 - DNA, 23 bp, Artificial Sequence
  Synthetic
ccgttttttttttttaacaacat

SEQ ID NO: 18814 - DNA, 23 bp, Artificial Sequence
  Synthetic
ccgttttttttttttaacaacag

SEQ ID NO: 18815 - DNA, 23 bp, Artificial Sequence
  Synthetic
ccgttttttttttttacaggtag

SEQ ID NO: 18816 - DNA, 23 bp, Artificial Sequence
  Synthetic
ccgttttttttttttccaatgtg

SEQ ID NO: 18817 - DNA, 23 bp, Artificial Sequence
  Synthetic
ccgttttttttttttacaggtag

SEQ ID NO: 18818 - DNA, 23 bp, Artificial Sequence
  Synthetic
ccgttttttttttttgttttgca

SEQ ID NO: 18819 - DNA, 23 bp, Artificial Sequence
  Synthetic
ccgttttttttttttgttttgca

SEQ ID NO: 18820 - DNA, 23 bp, Artificial Sequence
  Synthetic
ccgttttttttttttatcgttac

SEQ ID NO: 18821 - DNA, 23 bp, Artificial Sequence
  Synthetic
ccgttttttttttttatcattac

SEQ ID NO: 18822 - DNA, 23 bp, Artificial Sequence
  Synthetic
ccgttttttttttttatcattac

SEQ ID NO: 18823 - DNA, 23 bp, Artificial Sequence
  Synthetic
ccgttttttttttttaacaatgc

SEQ ID NO: 18824 - DNA, 23 bp, Artificial Sequence
  Synthetic
ccgttttttttttttccatgcgc

SEQ ID NO: 18825 - DNA, 23 bp, Artificial Sequence
  Synthetic
ccgttttttttttttgtggtcct

SEQ ID NO: 18826 - DNA, 23 bp, Artificial Sequence
  Synthetic
ccgttttttttttttggcatagg

SEQ ID NO: 18827 - DNA, 23 bp, Artificial Sequence
  Synthetic
ccgttttttttttttgactccgg

SEQ ID NO: 18828 - DNA, 23 bp, Artificial Sequence
  Synthetic
ccgttttttttttttacacactt

SEQ ID NO: 18829 - DNA, 23 bp, Artificial Sequence
  Synthetic
ccgttttttttttttgggaggag

SEQ ID NO: 18830 - DNA, 23 bp, Artificial Sequence
  Synthetic
ccgttttttttttttaagctttt

SEQ ID NO: 18831 - DNA, 23 bp, Artificial Sequence
  Synthetic
ccgttttttttttttcctgcact

SEQ ID NO: 18832 - DNA, 23 bp, Artificial Sequence
  Synthetic
ccgttttttttttttctgcacta

SEQ ID NO: 18833 - DNA, 23 bp, Artificial Sequence
  Synthetic
ccgttttttttttttacatcagt

SEQ ID NO: 18834 - DNA, 23 bp, Artificial Sequence
  Synthetic
ccgttttttttttttgccgctgt

SEQ ID NO: 18835 - DNA, 23 bp, Artificial Sequence
  Synthetic
ccgttttttttttttgcaaagga

SEQ ID NO: 18836 - DNA, 23 bp, Artificial Sequence
  Synthetic
ccgttttttttttttccgtgact

SEQ ID NO: 18837 - DNA, 23 bp, Artificial Sequence
  Synthetic
ccgttttttttttttcctgtctg

SEQ ID NO: 18838 - DNA, 23 bp, Artificial Sequence
  Synthetic
ccgttttttttttttgtcaaatc

SEQ ID NO: 18839 - DNA, 23 bp, Artificial Sequence
  Synthetic
ccgttttttttttttcagttgcc

SEQ ID NO: 18840 - DNA, 23 bp, Artificial Sequence
  Synthetic
ccgttttttttttttcatttgcc

SEQ ID NO: 18841 - DNA, 23 bp, Artificial Sequence
  Synthetic
ccgttttttttttttcagtcagt

SEQ ID NO: 18842 - DNA, 23 bp, Artificial Sequence
  Synthetic
ccgttttttttttttatggttag

SEQ ID NO: 18843 - DNA, 23 bp, Artificial Sequence
  Synthetic
ccgttttttttttttaattgcgt

SEQ ID NO: 18844 - DNA, 23 bp, Artificial Sequence
  Synthetic
ccgttttttttttttagttcttc

SEQ ID NO: 18845 - DNA, 23 bp, Artificial Sequence
  Synthetic
ccgttttttttttttacccagca

SEQ ID NO: 18846 - DNA, 23 bp, Artificial Sequence
  Synthetic
ccgttttttttttttgacccagt

SEQ ID NO: 18847 - DNA, 23 bp, Artificial Sequence
  Synthetic
ccgttttttttttttggtatttg

SEQ ID NO: 18848 - DNA, 23 bp, Artificial Sequence
  Synthetic
ccgttttttttttttacggaacc

SEQ ID NO: 18849 - DNA, 23 bp, Artificial Sequence
  Synthetic
ccgttttttttttttaaatccct

SEQ ID NO: 18850 - DNA, 23 bp, Artificial Sequence
  Synthetic
ccgttttttttttttaatccctg

SEQ ID NO: 18851 - DNA, 23 bp, Artificial Sequence
  Synthetic
ccgttttttttttttcctgctga

SEQ ID NO: 18852 - DNA, 23 bp, Artificial Sequence
  Synthetic
ccgttttttttttttgaccgaga

SEQ ID NO: 18853 - DNA, 23 bp, Artificial Sequence
  Synthetic
ccgttttttttttttctatcctg

SEQ ID NO: 18854 - DNA, 23 bp, Artificial Sequence
  Synthetic
ccgttttttttttttcctatcct

SEQ ID NO: 18855 - DNA, 23 bp, Artificial Sequence
  Synthetic
ccgttttttttttttggaactta

SEQ ID NO: 18856 - DNA, 23 bp, Artificial Sequence
  Synthetic
ccgttttttttttttagaactta

SEQ ID NO: 18857 - DNA, 23 bp, Artificial Sequence
  Synthetic
ccgttttttttttttaatagact

SEQ ID NO: 18858 - DNA, 23 bp, Artificial Sequence
  Synthetic
ccgttttttttttttaaagtgcc

SEQ ID NO: 18859 - DNA, 23 bp, Artificial Sequence
  Synthetic
ccgttttttttttttcacacaaa

SEQ ID NO: 18860 - DNA, 23 bp, Artificial Sequence
  Synthetic
ccgttttttttttttagagggcc

SEQ ID NO: 18861 - DNA, 23 bp, Artificial Sequence
  Synthetic
ccgttttttttttttcaaacaaa

SEQ ID NO: 18862 - DNA, 23 bp, Artificial Sequence
  Synthetic
ccgttttttttttttgagggcct

SEQ ID NO: 18863 - DNA, 23 bp, Artificial Sequence
  Synthetic
ccgttttttttttttactcaaaa

SEQ ID NO: 18864 - DNA, 23 bp, Artificial Sequence
  Synthetic
ccgttttttttttttaaagagcc

SEQ ID NO: 18865 - DNA, 23 bp, Artificial Sequence
  Synthetic
ccgttttttttttttactacaaa

SEQ ID NO: 18866 - DNA, 23 bp, Artificial Sequence
  Synthetic
ccgttttttttttttacacaaaa

SEQ ID NO: 18867 - DNA, 23 bp, Artificial Sequence
  Synthetic
ccgttttttttttttactcaaaa

SEQ ID NO: 18868 - DNA, 23 bp, Artificial Sequence
  Synthetic
ccgttttttttttttaggattga

SEQ ID NO: 18869 - DNA, 23 bp, Artificial Sequence
  Synthetic
ccgttttttttttttgcacatgc

SEQ ID NO: 18870 - DNA, 23 bp, Artificial Sequence
  Synthetic
ccgttttttttttttatgttcat

SEQ ID NO: 18871 - DNA, 23 bp, Artificial Sequence
  Synthetic
ccgttttttttttttaagaacag

SEQ ID NO: 18872 - DNA, 23 bp, Artificial Sequence
  Synthetic
ccgttttttttttttatgtggga

SEQ ID NO: 18873 - DNA, 23 bp, Artificial Sequence
  Synthetic
ccgttttttttttttccgatttc

SEQ ID NO: 18874 - DNA, 23 bp, Artificial Sequence
  Synthetic
ccgttttttttttttcactgatt

SEQ ID NO: 18875 - DNA, 23 bp, Artificial Sequence
  Synthetic
ccgttttttttttttcgatttca

SEQ ID NO: 18876 - DNA, 23 bp, Artificial Sequence
  Synthetic
ccgttttttttttttagagagct

SEQ ID NO: 18877 - DNA, 23 bp, Artificial Sequence
  Synthetic
ccgttttttttttttgacaatac

SEQ ID NO: 18878 - DNA, 23 bp, Artificial Sequence
  Synthetic
ccgttttttttttttgacaatac

SEQ ID NO: 18879 - DNA, 23 bp, Artificial Sequence
  Synthetic
ccgttttttttttttccaaaaca

SEQ ID NO: 18880 - DNA, 23 bp, Artificial Sequence
  Synthetic
ccgttttttttttttctaaaaca

SEQ ID NO: 18881 - DNA, 23 bp, Artificial Sequence
  Synthetic
ccgttttttttttttaaagcatt

SEQ ID NO: 18882 - DNA, 23 bp, Artificial Sequence
  Synthetic
ccgttttttttttttactgaaac

SEQ ID NO: 18883 - DNA, 23 bp, Artificial Sequence
  Synthetic
ccgttttttttttttgcaggtaa

SEQ ID NO: 18884 - DNA, 23 bp, Artificial Sequence
  Synthetic
ccgttttttttttttactcaaac

SEQ ID NO: 18885 - DNA, 23 bp, Artificial Sequence
  Synthetic
ccgttttttttttttgcaaacat

SEQ ID NO: 18886 - DNA, 23 bp, Artificial Sequence
  Synthetic
ccgttttttttttttcagtcgag

SEQ ID NO: 18887 - DNA, 23 bp, Artificial Sequence
  Synthetic
ccgttttttttttttctgagtgt

SEQ ID NO: 18888 - DNA, 23 bp, Artificial Sequence
  Synthetic
ccgttttttttttttgagagtgt

SEQ ID NO: 18889 - DNA, 23 bp, Artificial Sequence
  Synthetic
ccgttttttttttttcagtcggg

SEQ ID NO: 18890 - DNA, 23 bp, Artificial Sequence
  Synthetic
ccgttttttttttttagtcaagg

SEQ ID NO: 18891 - DNA, 23 bp, Artificial Sequence
  Synthetic
ccgttttttttttttaaacatcc

SEQ ID NO: 18892 - DNA, 23 bp, Artificial Sequence
  Synthetic
ccgttttttttttttgctatgcc

SEQ ID NO: 18893 - DNA, 23 bp, Artificial Sequence
  Synthetic
ccgttttttttttttaacttagt

SEQ ID NO: 18894 - DNA, 23 bp, Artificial Sequence
  Synthetic
ccgttttttttttttccctctca

SEQ ID NO: 18895 - DNA, 23 bp, Artificial Sequence
  Synthetic
ccgttttttttttttcagcgctt

SEQ ID NO: 18896 - DNA, 23 bp, Artificial Sequence
  Synthetic
ccgttttttttttttaggtcgac

SEQ ID NO: 18897 - DNA, 23 bp, Artificial Sequence
  Synthetic
ccgttttttttttttagcagcac

SEQ ID NO: 18898 - DNA, 23 bp, Artificial Sequence
  Synthetic
ccgttttttttttttccaatgcc

SEQ ID NO: 18899 - DNA, 23 bp, Artificial Sequence
  Synthetic
ccgttttttttttttacttactg

SEQ ID NO: 18900 - DNA, 23 bp, Artificial Sequence
  Synthetic
ccgttttttttttttggaggaag

SEQ ID NO: 18901 - DNA, 23 bp, Artificial Sequence
  Synthetic
ccgttttttttttttggaagggc

SEQ ID NO: 18902 - DNA, 23 bp, Artificial Sequence
  Synthetic
ccgttttttttttttaaaggtta

SEQ ID NO: 18903 - DNA, 23 bp, Artificial Sequence
  Synthetic
ccgttttttttttttatgcaact

SEQ ID NO: 18904 - DNA, 23 bp, Artificial Sequence
  Synthetic
ccgttttttttttttgcaggccc

SEQ ID NO: 18905 - DNA, 23 bp, Artificial Sequence
  Synthetic
ccgttttttttttttggataggc

SEQ ID NO: 18906 - DNA, 23 bp, Artificial Sequence
  Synthetic
ccgttttttttttttatttttcg

SEQ ID NO: 18907 - DNA, 23 bp, Artificial Sequence
  Synthetic
ccgttttttttttttaggcatca

SEQ ID NO: 18908 - DNA, 23 bp, Artificial Sequence
  Synthetic
ccgttttttttttttacaaaatc

SEQ ID NO: 18909 - DNA, 23 bp, Artificial Sequence
  Synthetic
ccgttttttttttttgctcctgg

SEQ ID NO: 18910 - DNA, 23 bp, Artificial Sequence
  Synthetic
ccgttttttttttttctataaag

SEQ ID NO: 18911 - DNA, 23 bp, Artificial Sequence
  Synthetic
ccgttttttttttttgaccgacc

SEQ ID NO: 18912 - DNA, 23 bp, Artificial Sequence
  Synthetic
ccgttttttttttttcgggtgcg

SEQ ID NO: 18913 - DNA, 23 bp, Artificial Sequence
  Synthetic
ccgttttttttttttagtcaggc

SEQ ID NO: 18914 - DNA, 23 bp, Artificial Sequence
  Synthetic
ccgttttttttttttactggact

SEQ ID NO: 18915 - DNA, 23 bp, Artificial Sequence
  Synthetic
ccgttttttttttttaggcaggc

SEQ ID NO: 18916 - DNA, 23 bp, Artificial Sequence
  Synthetic
ccgttttttttttttcaaccagc

SEQ ID NO: 18917 - DNA, 23 bp, Artificial Sequence
  Synthetic
ccgttttttttttttatcagcta

SEQ ID NO: 18918 - DNA, 23 bp, Artificial Sequence
  Synthetic
ccgttttttttttttaatcagct

SEQ ID NO: 18919 - DNA, 23 bp, Artificial Sequence
  Synthetic
ccgttttttttttttaagtgtat

SEQ ID NO: 18920 - DNA, 23 bp, Artificial Sequence
  Synthetic
ccgttttttttttttggctcaaa

SEQ ID NO: 18921 - DNA, 23 bp, Artificial Sequence
  Synthetic
ccgttttttttttttcccctgga

SEQ ID NO: 18922 - DNA, 23 bp, Artificial Sequence
  Synthetic
ccgttttttttttttcacctagg

SEQ ID NO: 18923 - DNA, 23 bp, Artificial Sequence
  Synthetic
ccgttttttttttttagatggat

SEQ ID NO: 18924 - DNA, 23 bp, Artificial Sequence
  Synthetic
ccgttttttttttttaggatttt

SEQ ID NO: 18925 - DNA, 23 bp, Artificial Sequence
  Synthetic
ccgttttttttttttccattgct

SEQ ID NO: 18926 - DNA, 23 bp, Artificial Sequence
  Synthetic
ccgttttttttttttgatcaacc

SEQ ID NO: 18927 - DNA, 23 bp, Artificial Sequence
  Synthetic
ccgttttttttttttaatataac

SEQ ID NO: 18928 - DNA, 23 bp, Artificial Sequence
  Synthetic
ccgttttttttttttccaggttc

SEQ ID NO: 18929 - DNA, 23 bp, Artificial Sequence
  Synthetic
ccgttttttttttttggacaatg

SEQ ID NO: 18930 - DNA, 23 bp, Artificial Sequence
  Synthetic
ccgttttttttttttcttagcag

SEQ ID NO: 18931 - DNA, 23 bp, Artificial Sequence
  Synthetic
ccgttttttttttttcgcgagcc

SEQ ID NO: 18932 - DNA, 23 bp, Artificial Sequence
  Synthetic
ccgttttttttttttgtggattt

SEQ ID NO: 18933 - DNA, 23 bp, Artificial Sequence
  Synthetic
ccgttttttttttttatagaagg

SEQ ID NO: 18934 - DNA, 23 bp, Artificial Sequence
  Synthetic
ccgttttttttttttagtggatg

SEQ ID NO: 18935 - DNA, 23 bp, Artificial Sequence
  Synthetic
ccgttttttttttttccatagaa

SEQ ID NO: 18936 - DNA, 23 bp, Artificial Sequence
  Synthetic
ccgttttttttttttgaaatttc

SEQ ID NO: 18937 - DNA, 23 bp, Artificial Sequence
  Synthetic
ccgttttttttttttaaaagttg

SEQ ID NO: 18938 - DNA, 23 bp, Artificial Sequence
  Synthetic
ccgttttttttttttacaggacc

SEQ ID NO: 18939 - DNA, 23 bp, Artificial Sequence
  Synthetic
ccgttttttttttttacgttcca

SEQ ID NO: 18940 - DNA, 23 bp, Artificial Sequence
  Synthetic
ccgttttttttttttgatgtgga

SEQ ID NO: 18941 - DNA, 23 bp, Artificial Sequence
  Synthetic
ccgttttttttttttgcatgttc

SEQ ID NO: 18942 - DNA, 23 bp, Artificial Sequence
  Synthetic
ccgttttttttttttagagagct

SEQ ID NO: 18943 - DNA, 23 bp, Artificial Sequence
  Synthetic
ccgttttttttttttaatccacc

SEQ ID NO: 18944 - DNA, 23 bp, Artificial Sequence
  Synthetic
ccgttttttttttttccacagtc

SEQ ID NO: 18945 - DNA, 23 bp, Artificial Sequence
  Synthetic
ccgttttttttttttaacaattt

SEQ ID NO: 18946 - DNA, 23 bp, Artificial Sequence
  Synthetic
ccgttttttttttttggggttca

SEQ ID NO: 18947 - DNA, 23 bp, Artificial Sequence
  Synthetic
ccgttttttttttttcaggccat

SEQ ID NO: 18948 - DNA, 23 bp, Artificial Sequence
  Synthetic
ccgttttttttttttgagggtta

SEQ ID NO: 18949 - DNA, 23 bp, Artificial Sequence
  Synthetic
ccgttttttttttttggctagtg

SEQ ID NO: 18950 - DNA, 23 bp, Artificial Sequence
  Synthetic
ccgttttttttttttccttctga

SEQ ID NO: 18951 - DNA, 23 bp, Artificial Sequence
  Synthetic
ccgttttttttttttaggggcct

SEQ ID NO: 18952 - DNA, 23 bp, Artificial Sequence
  Synthetic
ccgttttttttttttaaaacatg

SEQ ID NO: 18953 - DNA, 23 bp, Artificial Sequence
  Synthetic
ccgttttttttttttcggacacg

SEQ ID NO: 18954 - DNA, 23 bp, Artificial Sequence
  Synthetic
ccgttttttttttttggcattac

SEQ ID NO: 18955 - DNA, 23 bp, Artificial Sequence
  Synthetic
ccgttttttttttttgcatgacg

SEQ ID NO: 18956 - DNA, 23 bp, Artificial Sequence
  Synthetic
ccgttttttttttttaccgagga

SEQ ID NO: 18957 - DNA, 23 bp, Artificial Sequence
  Synthetic
ccgttttttttttttataatgac

SEQ ID NO: 18958 - DNA, 23 bp, Artificial Sequence
  Synthetic
ccgttttttttttttagtcgagt

SEQ ID NO: 18959 - DNA, 23 bp, Artificial Sequence
  Synthetic
ccgttttttttttttcaaaccat

SEQ ID NO: 18960 - DNA, 23 bp, Artificial Sequence
  Synthetic
ccgttttttttttttggacatcc

SEQ ID NO: 18961 - DNA, 23 bp, Artificial Sequence
  Synthetic
ccgttttttttttttcagctaac

SEQ ID NO: 18962 - DNA, 23 bp, Artificial Sequence
  Synthetic
ccgttttttttttttagctagca

SEQ ID NO: 18963 - DNA, 23 bp, Artificial Sequence
  Synthetic
ccgttttttttttttggaacaca

SEQ ID NO: 18964 - DNA, 23 bp, Artificial Sequence
  Synthetic
ccgttttttttttttaggaacat

SEQ ID NO: 18965 - DNA, 23 bp, Artificial Sequence
  Synthetic
ccgttttttttttttcatgcaaa

SEQ ID NO: 18966 - DNA, 23 bp, Artificial Sequence
  Synthetic
ccgttttttttttttctcagtaa

SEQ ID NO: 18967 - DNA, 23 bp, Artificial Sequence
  Synthetic
ccgttttttttttttcagtttcc

SEQ ID NO: 18968 - DNA, 23 bp, Artificial Sequence
  Synthetic
ccgttttttttttttgtatatgc

SEQ ID NO: 18969 - DNA, 23 bp, Artificial Sequence
  Synthetic
ccgttttttttttttatgtagtc

SEQ ID NO: 18970 - DNA, 23 bp, Artificial Sequence
  Synthetic
ccgttttttttttttggacaaca

SEQ ID NO: 18971 - DNA, 23 bp, Artificial Sequence
  Synthetic
ccgttttttttttttcacagaat

SEQ ID NO: 18972 - DNA, 23 bp, Artificial Sequence
  Synthetic
ccgttttttttttttcatcagtg

SEQ ID NO: 18973 - DNA, 23 bp, Artificial Sequence
  Synthetic
ccgttttttttttttatgtgtgc

SEQ ID NO: 18974 - DNA, 23 bp, Artificial Sequence
  Synthetic
ccgttttttttttttatacatgc

SEQ ID NO: 18975 - DNA, 23 bp, Artificial Sequence
  Synthetic
ccgttttttttttttaggtgtgt

SEQ ID NO: 18976 - DNA, 23 bp, Artificial Sequence
  Synthetic
ccgttttttttttttggtgtgtg

SEQ ID NO: 18977 - DNA, 23 bp, Artificial Sequence
  Synthetic
ccgttttttttttttgacacacg

SEQ ID NO: 18978 - DNA, 23 bp, Artificial Sequence
  Synthetic
ccgttttttttttttacaccaag

SEQ ID NO: 18979 - DNA, 23 bp, Artificial Sequence
  Synthetic
ccgttttttttttttccagtgcc

SEQ ID NO: 18980 - DNA, 23 bp, Artificial Sequence
  Synthetic
ccgttttttttttttaaaagcac

SEQ ID NO: 18981 - DNA, 23 bp, Artificial Sequence
  Synthetic
ccgttttttttttttaagacggg

SEQ ID NO: 18982 - DNA, 23 bp, Artificial Sequence
  Synthetic
ccgttttttttttttgggagggg

SEQ ID NO: 18983 - DNA, 23 bp, Artificial Sequence
  Synthetic
ccgttttttttttttgaggagag

SEQ ID NO: 18984 - DNA, 23 bp, Artificial Sequence
  Synthetic
ccgttttttttttttattcatca

SEQ ID NO: 18985 - DNA, 23 bp, Artificial Sequence
  Synthetic
ccgttttttttttttggggcagc

SEQ ID NO: 18986 - DNA, 23 bp, Artificial Sequence
  Synthetic
ccgttttttttttttggatgacc

SEQ ID NO: 18987 - DNA, 23 bp, Artificial Sequence
  Synthetic
ccgttttttttttttgagtgcta

SEQ ID NO: 18988 - DNA, 23 bp, Artificial Sequence
  Synthetic
ccgttttttttttttccaagaaa

SEQ ID NO: 18989 - DNA, 23 bp, Artificial Sequence
  Synthetic
ccgttttttttttttgccatata

SEQ ID NO: 18990 - DNA, 23 bp, Artificial Sequence
  Synthetic
ccgttttttttttttgcatggag

SEQ ID NO: 18991 - DNA, 23 bp, Artificial Sequence
  Synthetic
ccgttttttttttttcatggaag

SEQ ID NO: 18992 - DNA, 23 bp, Artificial Sequence
  Synthetic
ccgttttttttttttgtttcccg

SEQ ID NO: 18993 - DNA, 23 bp, Artificial Sequence
  Synthetic
ccgttttttttttttgaagtgca

SEQ ID NO: 18994 - DNA, 23 bp, Artificial Sequence
  Synthetic
ccgttttttttttttgattggcc

SEQ ID NO: 18995 - DNA, 23 bp, Artificial Sequence
  Synthetic
ccgttttttttttttaaaccaca

SEQ ID NO: 18996 - DNA, 23 bp, Artificial Sequence
  Synthetic
ccgttttttttttttacatcact

SEQ ID NO: 18997 - DNA, 23 bp, Artificial Sequence
  Synthetic
ccgttttttttttttaacccttg

SEQ ID NO: 18998 - DNA, 23 bp, Artificial Sequence
  Synthetic
ccgttttttttttttcccaggga

SEQ ID NO: 18999 - DNA, 23 bp, Artificial Sequence
  Synthetic
ccgttttttttttttaatccttg

SEQ ID NO: 19000 - DNA, 23 bp, Artificial Sequence
  Synthetic
ccgttttttttttttagtactgt

SEQ ID NO: 19001 - DNA, 23 bp, Artificial Sequence
  Synthetic
ccgttttttttttttaaaaccag

SEQ ID NO: 19002 - DNA, 23 bp, Artificial Sequence
  Synthetic
ccgttttttttttttggtcctac

SEQ ID NO: 19003 - DNA, 23 bp, Artificial Sequence
  Synthetic
ccgttttttttttttacaccaag

SEQ ID NO: 19004 - DNA, 23 bp, Artificial Sequence
  Synthetic
ccgttttttttttttaggatcga

SEQ ID NO: 19005 - DNA, 23 bp, Artificial Sequence
  Synthetic
ccgttttttttttttaccaacat

SEQ ID NO: 19006 - DNA, 23 bp, Artificial Sequence
  Synthetic
ccgttttttttttttgttatcaa

SEQ ID NO: 19007 - DNA, 23 bp, Artificial Sequence
  Synthetic
ccgttttttttttttgacatgat

SEQ ID NO: 19008 - DNA, 23 bp, Artificial Sequence
  Synthetic
ccgttttttttttttaagtgcac

SEQ ID NO: 19009 - DNA, 23 bp, Artificial Sequence
  Synthetic
ccgttttttttttttctccgtgc

SEQ ID NO: 19010 - DNA, 23 bp, Artificial Sequence
  Synthetic
ccgttttttttttttctcaaaga

SEQ ID NO: 19011 - DNA, 23 bp, Artificial Sequence
  Synthetic
ccgttttttttttttctgaaacc

SEQ ID NO: 19012 - DNA, 23 bp, Artificial Sequence
  Synthetic
ccgttttttttttttatcatcgc

SEQ ID NO: 19013 - DNA, 23 bp, Artificial Sequence
  Synthetic
ccgttttttttttttgagggaga

SEQ ID NO: 19014 - DNA, 23 bp, Artificial Sequence
  Synthetic
ccgttttttttttttacaaccct

SEQ ID NO: 19015 - DNA, 23 bp, Artificial Sequence
  Synthetic
ccgttttttttttttgggacctc

SEQ ID NO: 19016 - DNA, 23 bp, Artificial Sequence
  Synthetic
ccgttttttttttttctctcaca

SEQ ID NO: 19017 - DNA, 23 bp, Artificial Sequence
  Synthetic
ccgttttttttttttggctgggt

SEQ ID NO: 19018 - DNA, 23 bp, Artificial Sequence
  Synthetic
ccgttttttttttttagtgggcc

SEQ ID NO: 19019 - DNA, 23 bp, Artificial Sequence
  Synthetic
ccgttttttttttttatgaacat

SEQ ID NO: 19020 - DNA, 23 bp, Artificial Sequence
  Synthetic
ccgttttttttttttatgcacat

SEQ ID NO: 19021 - DNA, 23 bp, Artificial Sequence
  Synthetic
ccgttttttttttttacacatcc

SEQ ID NO: 19022 - DNA, 23 bp, Artificial Sequence
  Synthetic
ccgttttttttttttccacatac

SEQ ID NO: 19023 - DNA, 23 bp, Artificial Sequence
  Synthetic
ccgttttttttttttccagcccc

SEQ ID NO: 19024 - DNA, 23 bp, Artificial Sequence
  Synthetic
ccgttttttttttttcacacagt

SEQ ID NO: 19025 - DNA, 23 bp, Artificial Sequence
  Synthetic
ccgttttttttttttcaaggacc

SEQ ID NO: 19026 - DNA, 23 bp, Artificial Sequence
  Synthetic
ccgttttttttttttaccactcc

SEQ ID NO: 19027 - DNA, 23 bp, Artificial Sequence
  Synthetic
ccgttttttttttttgagatggg

SEQ ID NO: 19028 - DNA, 23 bp, Artificial Sequence
  Synthetic
ccgttttttttttttgagcggtt

SEQ ID NO: 19029 - DNA, 23 bp, Artificial Sequence
  Synthetic
ccgttttttttttttgtgggccc

SEQ ID NO: 19030 - DNA, 23 bp, Artificial Sequence
  Synthetic
ccgttttttttttttctcaacaa

SEQ ID NO: 19031 - DNA, 23 bp, Artificial Sequence
  Synthetic
ccgttttttttttttaagtccta

SEQ ID NO: 19032 - DNA, 23 bp, Artificial Sequence
  Synthetic
ccgttttttttttttgaagctaa

SEQ ID NO: 19033 - DNA, 23 bp, Artificial Sequence
  Synthetic
ccgttttttttttttccagtcct

SEQ ID NO: 19034 - DNA, 23 bp, Artificial Sequence
  Synthetic
ccgttttttttttttcaagagtc

SEQ ID NO: 19035 - DNA, 23 bp, Artificial Sequence
  Synthetic
ccgttttttttttttcccatgtc

SEQ ID NO: 19036 - DNA, 23 bp, Artificial Sequence
  Synthetic
ccgttttttttttttctgcctgc

SEQ ID NO: 19037 - DNA, 23 bp, Artificial Sequence
  Synthetic
ccgttttttttttttgacttcac

SEQ ID NO: 19038 - DNA, 23 bp, Artificial Sequence
  Synthetic
ccgttttttttttttggacacag

SEQ ID NO: 19039 - DNA, 23 bp, Artificial Sequence
  Synthetic
ccgttttttttttttcttgaagg

SEQ ID NO: 19040 - DNA, 23 bp, Artificial Sequence
  Synthetic
ccgttttttttttttcctcacct

SEQ ID NO: 19041 - DNA, 23 bp, Artificial Sequence
  Synthetic
ccgttttttttttttaccgtctg

SEQ ID NO: 19042 - DNA, 23 bp, Artificial Sequence
  Synthetic
ccgttttttttttttgctgcatt

SEQ ID NO: 19043 - DNA, 23 bp, Artificial Sequence
  Synthetic
ccgttttttttttttataagtag

SEQ ID NO: 19044 - DNA, 23 bp, Artificial Sequence
  Synthetic
ccgttttttttttttaccccgcc

SEQ ID NO: 19045 - DNA, 23 bp, Artificial Sequence
  Synthetic
ccgttttttttttttgtgagcct

SEQ ID NO: 19046 - DNA, 23 bp, Artificial Sequence
  Synthetic
ccgttttttttttttcctctctt

SEQ ID NO: 19047 - DNA, 23 bp, Artificial Sequence
  Synthetic
ccgttttttttttttgtgaggcg

SEQ ID NO: 19048 - DNA, 23 bp, Artificial Sequence
  Synthetic
ccgttttttttttttagccacat

SEQ ID NO: 19049 - DNA, 23 bp, Artificial Sequence
  Synthetic
ccgttttttttttttaaactttc

SEQ ID NO: 19050 - DNA, 23 bp, Artificial Sequence
  Synthetic
ccgttttttttttttaggcaaca

SEQ ID NO: 19051 - DNA, 23 bp, Artificial Sequence
  Synthetic
ccgttttttttttttgtcaccta

SEQ ID NO: 19052 - DNA, 23 bp, Artificial Sequence
  Synthetic
ccgttttttttttttcacagcaa

SEQ ID NO: 19053 - DNA, 23 bp, Artificial Sequence
  Synthetic
ccgttttttttttttcacaggac

SEQ ID NO: 19054 - DNA, 23 bp, Artificial Sequence
  Synthetic
ccgttttttttttttggaaggaa

SEQ ID NO: 19055 - DNA, 23 bp, Artificial Sequence
  Synthetic
ccgttttttttttttagccaggt

SEQ ID NO: 19056 - DNA, 23 bp, Artificial Sequence
  Synthetic
ccgttttttttttttacaaaatc

SEQ ID NO: 19057 - DNA, 23 bp, Artificial Sequence
  Synthetic
ccgttttttttttttggactcgg

SEQ ID NO: 19058 - DNA, 23 bp, Artificial Sequence
  Synthetic
ccgttttttttttttatctattt

SEQ ID NO: 19059 - DNA, 23 bp, Artificial Sequence
  Synthetic
ccgttttttttttttgcggggta

SEQ ID NO: 19060 - DNA, 23 bp, Artificial Sequence
  Synthetic
ccgttttttttttttcttctgaa

SEQ ID NO: 19061 - DNA, 23 bp, Artificial Sequence
  Synthetic
ccgttttttttttttggagcaga

SEQ ID NO: 19062 - DNA, 23 bp, Artificial Sequence
  Synthetic
ccgttttttttttttccacccca

SEQ ID NO: 19063 - DNA, 23 bp, Artificial Sequence
  Synthetic
ccgttttttttttttgacagggt

SEQ ID NO: 19064 - DNA, 23 bp, Artificial Sequence
  Synthetic
ccgttttttttttttaggcaagc

SEQ ID NO: 19065 - DNA, 23 bp, Artificial Sequence
  Synthetic
ccgttttttttttttaagctcac

SEQ ID NO: 19066 - DNA, 23 bp, Artificial Sequence
  Synthetic
ccgttttttttttttcctgcctc

SEQ ID NO: 19067 - DNA, 23 bp, Artificial Sequence
  Synthetic
ccgttttttttttttaactctcc

SEQ ID NO: 19068 - DNA, 23 bp, Artificial Sequence
  Synthetic
ccgttttttttttttcatctctc

SEQ ID NO: 19069 - DNA, 23 bp, Artificial Sequence
  Synthetic
ccgttttttttttttaccgcccg

SEQ ID NO: 19070 - DNA, 23 bp, Artificial Sequence
  Synthetic
ccgttttttttttttacacccgg

SEQ ID NO: 19071 - DNA, 23 bp, Artificial Sequence
  Synthetic
ccgttttttttttttgtgtgcct

SEQ ID NO: 19072 - DNA, 23 bp, Artificial Sequence
  Synthetic
ccgttttttttttttgaccgacc

SEQ ID NO: 19073 - DNA, 23 bp, Artificial Sequence
  Synthetic
ccgttttttttttttcgcggggg

SEQ ID NO: 19074 - DNA, 23 bp, Artificial Sequence
  Synthetic
ccgttttttttttttagaaggta

SEQ ID NO: 19075 - DNA, 23 bp, Artificial Sequence
  Synthetic
ccgttttttttttttacacccgg

SEQ ID NO: 19076 - DNA, 23 bp, Artificial Sequence
  Synthetic
ccgttttttttttttcatttttc

SEQ ID NO: 19077 - DNA, 23 bp, Artificial Sequence
  Synthetic
ccgttttttttttttaggcccca

SEQ ID NO: 19078 - DNA, 23 bp, Artificial Sequence
  Synthetic
ccgttttttttttttccctttta

SEQ ID NO: 19079 - DNA, 23 bp, Artificial Sequence
  Synthetic
ccgttttttttttttgttagccc

SEQ ID NO: 19080 - DNA, 23 bp, Artificial Sequence
  Synthetic
ccgttttttttttttggaccagg

SEQ ID NO: 19081 - DNA, 23 bp, Artificial Sequence
  Synthetic
ccgttttttttttttaaaattgt

SEQ ID NO: 19082 - DNA, 23 bp, Artificial Sequence
  Synthetic
ccgttttttttttttcccacaga

SEQ ID NO: 19083 - DNA, 23 bp, Artificial Sequence
  Synthetic
ccgttttttttttttcagtttca

SEQ ID NO: 19084 - DNA, 23 bp, Artificial Sequence
  Synthetic
ccgttttttttttttctgtcccg

SEQ ID NO: 19085 - DNA, 23 bp, Artificial Sequence
  Synthetic
ccgttttttttttttcactggtt

SEQ ID NO: 19086 - DNA, 23 bp, Artificial Sequence
  Synthetic
ccgttttttttttttagttgcca

SEQ ID NO: 19087 - DNA, 23 bp, Artificial Sequence
  Synthetic
ccgttttttttttttgaggacat

SEQ ID NO: 19088 - DNA, 23 bp, Artificial Sequence
  Synthetic
ccgttttttttttttagctccac

SEQ ID NO: 19089 - DNA, 23 bp, Artificial Sequence
  Synthetic
ccgttttttttttttcaaaatca

SEQ ID NO: 19090 - DNA, 23 bp, Artificial Sequence
  Synthetic
ccgttttttttttttgattccgc

SEQ ID NO: 19091 - DNA, 23 bp, Artificial Sequence
  Synthetic
ccgttttttttttttggatgaat

SEQ ID NO: 19092 - DNA, 23 bp, Artificial Sequence
  Synthetic
ccgttttttttttttaggtgagg

SEQ ID NO: 19093 - DNA, 23 bp, Artificial Sequence
  Synthetic
ccgttttttttttttctatgtcc

SEQ ID NO: 19094 - DNA, 23 bp, Artificial Sequence
  Synthetic
ccgttttttttttttacagctag

SEQ ID NO: 19095 - DNA, 23 bp, Artificial Sequence
  Synthetic
ccgttttttttttttcggttatc

SEQ ID NO: 19096 - DNA, 23 bp, Artificial Sequence
  Synthetic
ccgttttttttttttggccggga

SEQ ID NO: 19097 - DNA, 23 bp, Artificial Sequence
  Synthetic
ccgttttttttttttcctgcacg

SEQ ID NO: 19098 - DNA, 23 bp, Artificial Sequence
  Synthetic
ccgttttttttttttcaaaaatg

SEQ ID NO: 19099 - DNA, 23 bp, Artificial Sequence
  Synthetic
ccgttttttttttttcaatacaa

SEQ ID NO: 19100 - DNA, 23 bp, Artificial Sequence
  Synthetic
ccgttttttttttttaagatcgg

SEQ ID NO: 19101 - DNA, 23 bp, Artificial Sequence
  Synthetic
ccgttttttttttttcaaggtcg

SEQ ID NO: 19102 - DNA, 23 bp, Artificial Sequence
  Synthetic
ccgttttttttttttagttatca

SEQ ID NO: 19103 - DNA, 23 bp, Artificial Sequence
  Synthetic
ccgttttttttttttagccctgt

SEQ ID NO: 19104 - DNA, 23 bp, Artificial Sequence
  Synthetic
ccgttttttttttttaggagtct

SEQ ID NO: 19105 - DNA, 23 bp, Artificial Sequence
  Synthetic
ccgttttttttttttacctgcac

SEQ ID NO: 19106 - DNA, 23 bp, Artificial Sequence
  Synthetic
ccgttttttttttttgcactgtc

SEQ ID NO: 19107 - DNA, 23 bp, Artificial Sequence
  Synthetic
ccgttttttttttttagccctgt

SEQ ID NO: 19108 - DNA, 23 bp, Artificial Sequence
  Synthetic
ccgttttttttttttaaattcgg

SEQ ID NO: 19109 - DNA, 23 bp, Artificial Sequence
  Synthetic
ccgttttttttttttcaagttag

SEQ ID NO: 19110 - DNA, 23 bp, Artificial Sequence
  Synthetic
ccgttttttttttttccaagctc

SEQ ID NO: 19111 - DNA, 23 bp, Artificial Sequence
  Synthetic
ccgttttttttttttccttttaa

SEQ ID NO: 19112 - DNA, 23 bp, Artificial Sequence
  Synthetic
ccgttttttttttttagctggtt

SEQ ID NO: 19113 - DNA, 23 bp, Artificial Sequence
  Synthetic
ccgttttttttttttctctggtc

SEQ ID NO: 19114 - DNA, 23 bp, Artificial Sequence
  Synthetic
ccgttttttttttttccataggg

SEQ ID NO: 19115 - DNA, 23 bp, Artificial Sequence
  Synthetic
ccgttttttttttttgtacatca

SEQ ID NO: 19116 - DNA, 23 bp, Artificial Sequence
  Synthetic
ccgttttttttttttgggattcc

SEQ ID NO: 19117 - DNA, 23 bp, Artificial Sequence
  Synthetic
ccgttttttttttttagaagcat

SEQ ID NO: 19118 - DNA, 23 bp, Artificial Sequence
  Synthetic
ccgttttttttttttcttttgtg

SEQ ID NO: 19119 - DNA, 23 bp, Artificial Sequence
  Synthetic
ccgttttttttttttaaggcaac

SEQ ID NO: 19120 - DNA, 23 bp, Artificial Sequence
  Synthetic
ccgttttttttttttcaaaccat

SEQ ID NO: 19121 - DNA, 23 bp, Artificial Sequence
  Synthetic
ccgttttttttttttaaccatga

SEQ ID NO: 19122 - DNA, 23 bp, Artificial Sequence
  Synthetic
ccgttttttttttttccaatatt

SEQ ID NO: 19123 - DNA, 23 bp, Artificial Sequence
  Synthetic
ccgttttttttttttaagtgcct

SEQ ID NO: 19124 - DNA, 23 bp, Artificial Sequence
  Synthetic
ccgttttttttttttacctgcac

SEQ ID NO: 19125 - DNA, 23 bp, Artificial Sequence
  Synthetic
ccgttttttttttttgcactaga

SEQ ID NO: 19126 - DNA, 23 bp, Artificial Sequence
  Synthetic
ccgttttttttttttcaccgaca

SEQ ID NO: 19127 - DNA, 23 bp, Artificial Sequence
  Synthetic
ccgttttttttttttacaatcaa

SEQ ID NO: 19128 - DNA, 23 bp, Artificial Sequence
  Synthetic
ccgttttttttttttcccaccga

SEQ ID NO: 19129 - DNA, 23 bp, Artificial Sequence
  Synthetic
ccgttttttttttttgtgaattc

SEQ ID NO: 19130 - DNA, 23 bp, Artificial Sequence
  Synthetic
ccgttttttttttttccttatca

SEQ ID NO: 19131 - DNA, 23 bp, Artificial Sequence
  Synthetic
ccgttttttttttttgctgcaac

SEQ ID NO: 19132 - DNA, 23 bp, Artificial Sequence
  Synthetic
ccgttttttttttttcctccacc

SEQ ID NO: 19133 - DNA, 23 bp, Artificial Sequence
  Synthetic
ccgttttttttttttgatatcag

SEQ ID NO: 19134 - DNA, 23 bp, Artificial Sequence
  Synthetic
ccgttttttttttttacatggag

SEQ ID NO: 19135 - DNA, 23 bp, Artificial Sequence
  Synthetic
ccgttttttttttttcgggtgga

SEQ ID NO: 19136 - DNA, 23 bp, Artificial Sequence
  Synthetic
ccgttttttttttttatttcccc

SEQ ID NO: 19137 - DNA, 23 bp, Artificial Sequence
  Synthetic
ccgttttttttttttacaggtag

SEQ ID NO: 19138 - DNA, 23 bp, Artificial Sequence
  Synthetic
ccgttttttttttttgttttgca

SEQ ID NO: 19139 - DNA, 23 bp, Artificial Sequence
  Synthetic
ccgttttttttttttgttttgca

SEQ ID NO: 19140 - DNA, 23 bp, Artificial Sequence
  Synthetic
ccgttttttttttttctgcacta

SEQ ID NO: 19141 - DNA, 23 bp, Artificial Sequence
  Synthetic
ccgttttttttttttgcatagga

SEQ ID NO: 19142 - DNA, 23 bp, Artificial Sequence
  Synthetic
ccgttttttttttttgactccgg

SEQ ID NO: 19143 - DNA, 23 bp, Artificial Sequence
  Synthetic
ccgttttttttttttacacactt

SEQ ID NO: 19144 - DNA, 23 bp, Artificial Sequence
  Synthetic
ccgttttttttttttacatcagt

SEQ ID NO: 19145 - DNA, 23 bp, Artificial Sequence
  Synthetic
ccgttttttttttttgcgaagga

SEQ ID NO: 19146 - DNA, 23 bp, Artificial Sequence
  Synthetic
ccgttttttttttttcctgtctg

SEQ ID NO: 19147 - DNA, 23 bp, Artificial Sequence
  Synthetic
ccgttttttttttttgtcaattc

SEQ ID NO: 19148 - DNA, 23 bp, Artificial Sequence
  Synthetic
ccgttttttttttttatggttag

SEQ ID NO: 19149 - DNA, 23 bp, Artificial Sequence
  Synthetic
ccgttttttttttttagttcttc

SEQ ID NO: 19150 - DNA, 23 bp, Artificial Sequence
  Synthetic
ccgttttttttttttagtgtcag

SEQ ID NO: 19151 - DNA, 23 bp, Artificial Sequence
  Synthetic
ccgttttttttttttacggaacc

SEQ ID NO: 19152 - DNA, 23 bp, Artificial Sequence
  Synthetic
ccgttttttttttttaaatccct

SEQ ID NO: 19153 - DNA, 23 bp, Artificial Sequence
  Synthetic
ccgttttttttttttcctgctga

SEQ ID NO: 19154 - DNA, 23 bp, Artificial Sequence
  Synthetic
ccgttttttttttttgaccgaga

SEQ ID NO: 19155 - DNA, 23 bp, Artificial Sequence
  Synthetic
ccgttttttttttttcctatcct

SEQ ID NO: 19156 - DNA, 23 bp, Artificial Sequence
  Synthetic
ccgttttttttttttcggaactt

SEQ ID NO: 19157 - DNA, 23 bp, Artificial Sequence
  Synthetic
ccgttttttttttttaatagact

SEQ ID NO: 19158 - DNA, 23 bp, Artificial Sequence
  Synthetic
ccgttttttttttttccgatttc

SEQ ID NO: 19159 - DNA, 23 bp, Artificial Sequence
  Synthetic
ccgttttttttttttgatttcaa

SEQ ID NO: 19160 - DNA, 23 bp, Artificial Sequence
  Synthetic
ccgttttttttttttgagtgtag

SEQ ID NO: 19161 - DNA, 23 bp, Artificial Sequence
  Synthetic
ccgttttttttttttgagagtgt

SEQ ID NO: 19162 - DNA, 23 bp, Artificial Sequence
  Synthetic
ccgttttttttttttcagtcggg

SEQ ID NO: 19163 - DNA, 23 bp, Artificial Sequence
  Synthetic
ccgttttttttttttgctatgcc

SEQ ID NO: 19164 - DNA, 23 bp, Artificial Sequence
  Synthetic
ccgttttttttttttaacttagt

SEQ ID NO: 19165 - DNA, 23 bp, Artificial Sequence
  Synthetic
ccgttttttttttttatgcaact

SEQ ID NO: 19166 - DNA, 23 bp, Artificial Sequence
  Synthetic
ccgttttttttttttaaccagct

SEQ ID NO: 19167 - DNA, 23 bp, Artificial Sequence
  Synthetic
ccgttttttttttttcaaaatca

SEQ ID NO: 19168 - DNA, 23 bp, Artificial Sequence
  Synthetic
ccgttttttttttttacagctag

SEQ ID NO: 19169 - DNA, 23 bp, Artificial Sequence
  Synthetic
ccgttttttttttttaggccggg

SEQ ID NO: 19170 - DNA, 23 bp, Artificial Sequence
  Synthetic
ccgttttttttttttcctgcacg

SEQ ID NO: 19171 - DNA, 23 bp, Artificial Sequence
  Synthetic
ccgttttttttttttaaaaatgt

SEQ ID NO: 19172 - DNA, 23 bp, Artificial Sequence
  Synthetic
ccgttttttttttttcaagatcg

SEQ ID NO: 19173 - DNA, 23 bp, Artificial Sequence
  Synthetic
ccgttttttttttttctctctct

SEQ ID NO: 19174 - DNA, 23 bp, Artificial Sequence
  Synthetic
ccgttttttttttttcatacagg

SEQ ID NO: 19175 - DNA, 23 bp, Artificial Sequence
  Synthetic
ccgttttttttttttgatgcaga

SEQ ID NO: 19176 - DNA, 23 bp, Artificial Sequence
  Synthetic
ccgttttttttttttggaatgaa

SEQ ID NO: 19177 - DNA, 23 bp, Artificial Sequence
  Synthetic
ccgttttttttttttgcaagtca

SEQ ID NO: 19178 - DNA, 23 bp, Artificial Sequence
  Synthetic
ccgttttttttttttgcaagtca

SEQ ID NO: 19179 - DNA, 23 bp, Artificial Sequence
  Synthetic
ccgttttttttttttattggcac

SEQ ID NO: 19180 - DNA, 23 bp, Artificial Sequence
  Synthetic
ccgttttttttttttgagctccc

SEQ ID NO: 19181 - DNA, 23 bp, Artificial Sequence
  Synthetic
ccgttttttttttttcaatgcga

SEQ ID NO: 19182 - DNA, 23 bp, Artificial Sequence
  Synthetic
ccgttttttttttttgttccccc

SEQ ID NO: 19183 - DNA, 23 bp, Artificial Sequence
  Synthetic
ccgttttttttttttgttccccc

SEQ ID NO: 19184 - DNA, 23 bp, Artificial Sequence
  Synthetic
ccgttttttttttttgttccccc

SEQ ID NO: 19185 - DNA, 23 bp, Artificial Sequence
  Synthetic
ccgttttttttttttgttccccc

SEQ ID NO: 19186 - DNA, 23 bp, Artificial Sequence
  Synthetic
ccgttttttttttttgttccccc

SEQ ID NO: 19187 - DNA, 23 bp, Artificial Sequence
  Synthetic
ccgttttttttttttgttccccc

SEQ ID NO: 19188 - DNA, 23 bp, Artificial Sequence
  Synthetic
ccgttttttttttttgttccccc

SEQ ID NO: 19189 - DNA, 23 bp, Artificial Sequence
  Synthetic
ccgttttttttttttgttccccc

SEQ ID NO: 19190 - DNA, 23 bp, Artificial Sequence
  Synthetic
ccgttttttttttttgttccccc

SEQ ID NO: 19191 - DNA, 23 bp, Artificial Sequence
  Synthetic
ccgttttttttttttgttccccc

SEQ ID NO: 19192 - DNA, 23 bp, Artificial Sequence
  Synthetic
ccgttttttttttttgttccccc

SEQ ID NO: 19193 - DNA, 23 bp, Artificial Sequence
  Synthetic
ccgttttttttttttgttccccc

SEQ ID NO: 19194 - DNA, 23 bp, Artificial Sequence
  Synthetic
ccgttttttttttttgttccccc

SEQ ID NO: 19195 - DNA, 23 bp, Artificial Sequence
  Synthetic
ccgttttttttttttgttccccc

SEQ ID NO: 19196 - DNA, 23 bp, Artificial Sequence
  Synthetic
ccgttttttttttttgttccccc

SEQ ID NO: 19197 - DNA, 23 bp, Artificial Sequence
  Synthetic
ccgttttttttttttgttccccc

SEQ ID NO: 19198 - DNA, 23 bp, Artificial Sequence
  Synthetic
ccgttttttttttttggcaaatc

SEQ ID NO: 19199 - DNA, 23 bp, Artificial Sequence
  Synthetic
ccgttttttttttttgggcagct

SEQ ID NO: 19200 - DNA, 23 bp, Artificial Sequence
  Synthetic
ccgttttttttttttgggcaaat

SEQ ID NO: 19201 - DNA, 23 bp, Artificial Sequence
  Synthetic
ccgttttttttttttggcagctc

SEQ ID NO: 19202 - DNA, 23 bp, Artificial Sequence
  Synthetic
ccgttttttttttttggcaaatc

SEQ ID NO: 19203 - DNA, 23 bp, Artificial Sequence
  Synthetic
ccgttttttttttttccaagctc

SEQ ID NO: 19204 - DNA, 23 bp, Artificial Sequence
  Synthetic
ccgttttttttttttatcatcaa

SEQ ID NO: 19205 - DNA, 23 bp, Artificial Sequence
  Synthetic
ccgttttttttttttgcatgacg

SEQ ID NO: 19206 - DNA, 23 bp, Artificial Sequence
  Synthetic
ccgttttttttttttacccaatg

SEQ ID NO: 19207 - DNA, 23 bp, Artificial Sequence
  Synthetic
ccgttttttttttttctcactct

SEQ ID NO: 19208 - DNA, 23 bp, Artificial Sequence
  Synthetic
ccgttttttttttttctcactct

SEQ ID NO: 19209 - DNA, 23 bp, Artificial Sequence
  Synthetic
ccgttttttttttttctcactct

SEQ ID NO: 19210 - DNA, 23 bp, Artificial Sequence
  Synthetic
ccgttttttttttttctcactct

SEQ ID NO: 19211 - DNA, 23 bp, Artificial Sequence
  Synthetic
ccgttttttttttttctcactct

SEQ ID NO: 19212 - DNA, 23 bp, Artificial Sequence
  Synthetic
ccgttttttttttttctcactct

SEQ ID NO: 19213 - DNA, 23 bp, Artificial Sequence
  Synthetic
ccgttttttttttttctcactct

SEQ ID NO: 19214 - DNA, 23 bp, Artificial Sequence
  Synthetic
ccgttttttttttttctcactct

SEQ ID NO: 19215 - DNA, 23 bp, Artificial Sequence
  Synthetic
ccgttttttttttttctcactct

SEQ ID NO: 19216 - DNA, 23 bp, Artificial Sequence
  Synthetic
ccgttttttttttttctcactct

SEQ ID NO: 19217 - DNA, 23 bp, Artificial Sequence
  Synthetic
ccgttttttttttttctctctct

SEQ ID NO: 19218 - DNA, 23 bp, Artificial Sequence
  Synthetic
ccgttttttttttttctcactct

SEQ ID NO: 19219 - DNA, 23 bp, Artificial Sequence
  Synthetic
ccgttttttttttttgagctccc

SEQ ID NO: 19220 - DNA, 23 bp, Artificial Sequence
  Synthetic
ccgttttttttttttgagctccc

SEQ ID NO: 19221 - DNA, 23 bp, Artificial Sequence
  Synthetic
ccgttttttttttttagctccct

SEQ ID NO: 19222 - DNA, 23 bp, Artificial Sequence
  Synthetic
ccgttttttttttttgagctccc

SEQ ID NO: 19223 - DNA, 23 bp, Artificial Sequence
  Synthetic
ccgttttttttttttgagctccc

SEQ ID NO: 19224 - DNA, 23 bp, Artificial Sequence
  Synthetic
ccgttttttttttttagctccct

SEQ ID NO: 19225 - DNA, 23 bp, Artificial Sequence
  Synthetic
ccgttttttttttttcatacagg

SEQ ID NO: 19226 - DNA, 23 bp, Artificial Sequence
  Synthetic
ccgttttttttttttcatacagg

SEQ ID NO: 19227 - DNA, 23 bp, Artificial Sequence
  Synthetic
ccgttttttttttttcatacagg

SEQ ID NO: 19228 - DNA, 23 bp, Artificial Sequence
  Synthetic
ccgttttttttttttcatacagg

SEQ ID NO: 19229 - DNA, 23 bp, Artificial Sequence
  Synthetic
ccgttttttttttttgcatacag

SEQ ID NO: 19230 - DNA, 23 bp, Artificial Sequence
  Synthetic
ccgttttttttttttcattcagg

SEQ ID NO: 19231 - DNA, 23 bp, Artificial Sequence
  Synthetic
ccgttttttttttttgatgcaga

SEQ ID NO: 19232 - DNA, 23 bp, Artificial Sequence
  Synthetic
ccgttttttttttttgatgcaga

SEQ ID NO: 19233 - DNA, 23 bp, Artificial Sequence
  Synthetic
ccgttttttttttttacgtgccc

SEQ ID NO: 19234 - DNA, 23 bp, Artificial Sequence
  Synthetic
ccgttttttttttttacgtgccc

SEQ ID NO: 19235 - DNA, 23 bp, Artificial Sequence
  Synthetic
ccgttttttttttttacgtaccc

SEQ ID NO: 19236 - DNA, 23 bp, Artificial Sequence
  Synthetic
ccgttttttttttttcacgtgcc

SEQ ID NO: 19237 - DNA, 23 bp, Artificial Sequence
  Synthetic
ccgttttttttttttacgtgccc

SEQ ID NO: 19238 - DNA, 23 bp, Artificial Sequence
  Synthetic
ccgttttttttttttacgtgccc

SEQ ID NO: 19239 - DNA, 23 bp, Artificial Sequence
  Synthetic
ccgttttttttttttggaatgaa

SEQ ID NO: 19240 - DNA, 23 bp, Artificial Sequence
  Synthetic
ccgttttttttttttggaatgaa

SEQ ID NO: 19241 - DNA, 23 bp, Artificial Sequence
  Synthetic
ccgttttttttttttggaatgaa

SEQ ID NO: 19242 - DNA, 23 bp, Artificial Sequence
  Synthetic
ccgttttttttttttggaatgaa

SEQ ID NO: 19243 - DNA, 23 bp, Artificial Sequence
  Synthetic
ccgttttttttttttggaatgaa

SEQ ID NO: 19244 - DNA, 23 bp, Artificial Sequence
  Synthetic
ccgttttttttttttggaatgaa

SEQ ID NO: 19245 - DNA, 23 bp, Artificial Sequence
  Synthetic
ccgttttttttttttggaatgaa

SEQ ID NO: 19246 - DNA, 23 bp, Artificial Sequence
  Synthetic
ccgttttttttttttggaatgaa

SEQ ID NO: 19247 - DNA, 23 bp, Artificial Sequence
  Synthetic
ccgttttttttttttggaatgaa

SEQ ID NO: 19248 - DNA, 23 bp, Artificial Sequence
  Synthetic
ccgttttttttttttggaatgaa

SEQ ID NO: 19249 - DNA, 23 bp, Artificial Sequence
  Synthetic
ccgttttttttttttggattgaa

SEQ ID NO: 19250 - DNA, 23 bp, Artificial Sequence
  Synthetic
ccgttttttttttttggattgaa

SEQ ID NO: 19251 - DNA, 23 bp, Artificial Sequence
  Synthetic
ccgttttttttttttggaatgaa

SEQ ID NO: 19252 - DNA, 23 bp, Artificial Sequence
  Synthetic
ccgttttttttttttggaatgaa

SEQ ID NO: 19253 - DNA, 23 bp, Artificial Sequence
  Synthetic
ccgttttttttttttatcatgct

SEQ ID NO: 19254 - DNA, 23 bp, Artificial Sequence
  Synthetic
ccgttttttttttttatcatgct

SEQ ID NO: 19255 - DNA, 23 bp, Artificial Sequence
  Synthetic
ccgttttttttttttatcatgct

SEQ ID NO: 19256 - DNA, 23 bp, Artificial Sequence
  Synthetic
ccgttttttttttttgatcatgc

SEQ ID NO: 19257 - DNA, 23 bp, Artificial Sequence
  Synthetic
ccgttttttttttttgatcatgc

SEQ ID NO: 19258 - DNA, 23 bp, Artificial Sequence
  Synthetic
ccgttttttttttttgatcatgc

SEQ ID NO: 19259 - DNA, 23 bp, Artificial Sequence
  Synthetic
ccgttttttttttttgatcatgc

SEQ ID NO: 19260 - DNA, 23 bp, Artificial Sequence
  Synthetic
ccgttttttttttttgatcatgc

SEQ ID NO: 19261 - DNA, 23 bp, Artificial Sequence
  Synthetic
ccgttttttttttttgatcatgc

SEQ ID NO: 19262 - DNA, 23 bp, Artificial Sequence
  Synthetic
ccgttttttttttttgatcatgc

SEQ ID NO: 19263 - DNA, 23 bp, Artificial Sequence
  Synthetic
ccgttttttttttttccgatctg

SEQ ID NO: 19264 - DNA, 23 bp, Artificial Sequence
  Synthetic
ccgttttttttttttcgagctgc

SEQ ID NO: 19265 - DNA, 23 bp, Artificial Sequence
  Synthetic
ccgttttttttttttgcaagtca

SEQ ID NO: 19266 - DNA, 23 bp, Artificial Sequence
  Synthetic
ccgttttttttttttggcaagtc

SEQ ID NO: 19267 - DNA, 23 bp, Artificial Sequence
  Synthetic
ccgttttttttttttggcaagtc

SEQ ID NO: 19268 - DNA, 23 bp, Artificial Sequence
  Synthetic
ccgttttttttttttggcaattc

SEQ ID NO: 19269 - DNA, 23 bp, Artificial Sequence
  Synthetic
ccgttttttttttttggcaagtc

SEQ ID NO: 19270 - DNA, 23 bp, Artificial Sequence
  Synthetic
ccgttttttttttttgcaagtca

SEQ ID NO: 19271 - DNA, 23 bp, Artificial Sequence
  Synthetic
ccgttttttttttttgcaagtca

SEQ ID NO: 19272 - DNA, 23 bp, Artificial Sequence
  Synthetic
ccgttttttttttttggcaagtc

SEQ ID NO: 19273 - DNA, 23 bp, Artificial Sequence
  Synthetic
ccgttttttttttttggcaagtc

SEQ ID NO: 19274 - DNA, 23 bp, Artificial Sequence
  Synthetic
ccgttttttttttttggcaagtc

SEQ ID NO: 19275 - DNA, 23 bp, Artificial Sequence
  Synthetic
ccgttttttttttttggcaagtc

SEQ ID NO: 19276 - DNA, 23 bp, Artificial Sequence
  Synthetic
ccgttttttttttttggcaagtc

SEQ ID NO: 19277 - DNA, 23 bp, Artificial Sequence
  Synthetic
ccgttttttttttttggcaagtc

SEQ ID NO: 19278 - DNA, 23 bp, Artificial Sequence
  Synthetic
ccgttttttttttttgcaagtca

SEQ ID NO: 19279 - DNA, 23 bp, Artificial Sequence
  Synthetic
ccgttttttttttttgcaagtca

SEQ ID NO: 19280 - DNA, 23 bp, Artificial Sequence
  Synthetic
ccgttttttttttttggcaagtt

SEQ ID NO: 19281 - DNA, 23 bp, Artificial Sequence
  Synthetic
ccgttttttttttttgggcagtc

SEQ ID NO: 19282 - DNA, 23 bp, Artificial Sequence
  Synthetic
ccgttttttttttttattggcgc

SEQ ID NO: 19283 - DNA, 23 bp, Artificial Sequence
  Synthetic
ccgttttttttttttattggcac

SEQ ID NO: 19284 - DNA, 23 bp, Artificial Sequence
  Synthetic
ccgttttttttttttattggcac

SEQ ID NO: 19285 - DNA, 23 bp, Artificial Sequence
  Synthetic
ccgttttttttttttattggcac

SEQ ID NO: 19286 - DNA, 23 bp, Artificial Sequence
  Synthetic
ccgttttttttttttattggcac

SEQ ID NO: 19287 - DNA, 23 bp, Artificial Sequence
  Synthetic
ccgttttttttttttattggcac

SEQ ID NO: 19288 - DNA, 23 bp, Artificial Sequence
  Synthetic
ccgttttttttttttattggctc

SEQ ID NO: 19289 - DNA, 23 bp, Artificial Sequence
  Synthetic
ccgttttttttttttgatattgg

SEQ ID NO: 19290 - DNA, 23 bp, Artificial Sequence
  Synthetic
ccgttttttttttttattgacgc

SEQ ID NO: 19291 - DNA, 23 bp, Artificial Sequence
  Synthetic
ccgttttttttttttcagcatca

SEQ ID NO: 19292 - DNA, 23 bp, Artificial Sequence
  Synthetic
ccgttttttttttttcagcatca

SEQ ID NO: 19293 - DNA, 23 bp, Artificial Sequence
  Synthetic
ccgttttttttttttcagcatca

SEQ ID NO: 19294 - DNA, 23 bp, Artificial Sequence
  Synthetic
ccgttttttttttttcagcatca

SEQ ID NO: 19295 - DNA, 23 bp, Artificial Sequence
  Synthetic
ccgttttttttttttgagcaccc

SEQ ID NO: 19296 - DNA, 23 bp, Artificial Sequence
  Synthetic
ccgttttttttttttgagcaccc

SEQ ID NO: 19297 - DNA, 23 bp, Artificial Sequence
  Synthetic
ccgttttttttttttcgctatcc

SEQ ID NO: 19298 - DNA, 23 bp, Artificial Sequence
  Synthetic
ccgttttttttttttcaatgcga

SEQ ID NO: 19299 - DNA, 23 bp, Artificial Sequence
  Synthetic
ccgttttttttttttatcaatgc

SEQ ID NO: 19300 - DNA, 23 bp, Artificial Sequence
  Synthetic
ccgttttttttttttaggtggac

SEQ ID NO: 19301 - DNA, 23 bp, Artificial Sequence
  Synthetic
ccgttttttttttttgttccccc

SEQ ID NO: 19302 - DNA, 23 bp, Artificial Sequence
  Synthetic
ccgttttttttttttgttccccc

SEQ ID NO: 19303 - DNA, 23 bp, Artificial Sequence
  Synthetic
ccgttttttttttttgttcctcc

SEQ ID NO: 19304 - DNA, 23 bp, Artificial Sequence
  Synthetic
ccgttttttttttttgttccccc

SEQ ID NO: 19305 - DNA, 23 bp, Artificial Sequence
  Synthetic
ccgttttttttttttgttccccc

SEQ ID NO: 19306 - DNA, 23 bp, Artificial Sequence
  Synthetic
ccgttttttttttttgttccccc

SEQ ID NO: 19307 - DNA, 23 bp, Artificial Sequence
  Synthetic
ccgttttttttttttgttccccc

SEQ ID NO: 19308 - DNA, 23 bp, Artificial Sequence
  Synthetic
ccgttttttttttttgttccccc

SEQ ID NO: 19309 - DNA, 23 bp, Artificial Sequence
  Synthetic
ccgttttttttttttgttccccc

SEQ ID NO: 19310 - DNA, 23 bp, Artificial Sequence
  Synthetic
ccgttttttttttttgttccccc

SEQ ID NO: 19311 - DNA, 23 bp, Artificial Sequence
  Synthetic
ccgttttttttttttgttccccc

SEQ ID NO: 19312 - DNA, 23 bp, Artificial Sequence
  Synthetic
ccgttttttttttttgttccccc

SEQ ID NO: 19313 - DNA, 23 bp, Artificial Sequence
  Synthetic
ccgttttttttttttgttccccc

SEQ ID NO: 19314 - DNA, 23 bp, Artificial Sequence
  Synthetic
ccgttttttttttttgttccccc

SEQ ID NO: 19315 - DNA, 23 bp, Artificial Sequence
  Synthetic
ccgttttttttttttgttcctcc

SEQ ID NO: 19316 - DNA, 23 bp, Artificial Sequence
  Synthetic
ccgttttttttttttgttccccc

SEQ ID NO: 19317 - DNA, 23 bp, Artificial Sequence
  Synthetic
ccgttttttttttttgttccccc

SEQ ID NO: 19318 - DNA, 23 bp, Artificial Sequence
  Synthetic
ccgttttttttttttgttccccc

SEQ ID NO: 19319 - DNA, 23 bp, Artificial Sequence
  Synthetic
ccgttttttttttttgttccccc

SEQ ID NO: 19320 - DNA, 23 bp, Artificial Sequence
  Synthetic
ccgttttttttttttgtttcccc

SEQ ID NO: 19321 - DNA, 23 bp, Artificial Sequence
  Synthetic
ccgttttttttttttcccccaaa

SEQ ID NO: 19322 - DNA, 23 bp, Artificial Sequence
  Synthetic
ccgttttttttttttgttccgcc

SEQ ID NO: 19323 - DNA, 23 bp, Artificial Sequence
  Synthetic
ccgttttttttttttgaatcccc

SEQ ID NO: 19324 - DNA, 23 bp, Artificial Sequence
  Synthetic
ccgttttttttttttgttcaaga

SEQ ID NO: 19325 - DNA, 23 bp, Artificial Sequence
  Synthetic
ccgttttttttttttgttcaaga

SEQ ID NO: 19326 - DNA, 23 bp, Artificial Sequence
  Synthetic
ccgttttttttttttgttcaaga

SEQ ID NO: 19327 - DNA, 23 bp, Artificial Sequence
  Synthetic
ccgttttttttttttgttcaaga

SEQ ID NO: 19328 - DNA, 23 bp, Artificial Sequence
  Synthetic
ccgttttttttttttgttcaaga

SEQ ID NO: 19329 - DNA, 23 bp, Artificial Sequence
  Synthetic
ccgttttttttttttcaacgctg

SEQ ID NO: 19330 - DNA, 23 bp, Artificial Sequence
  Synthetic
ccgttttttttttttcaacgctg

SEQ ID NO: 19331 - DNA, 23 bp, Artificial Sequence
  Synthetic
ccgttttttttttttggggtgac

SEQ ID NO: 19332 - DNA, 23 bp, Artificial Sequence
  Synthetic
ccgttttttttttttggggcgac

SEQ ID NO: 19333 - DNA, 23 bp, Artificial Sequence
  Synthetic
ccgttttttttttttgggcaatt

SEQ ID NO: 19334 - DNA, 23 bp, Artificial Sequence
  Synthetic
ccgttttttttttttgggcaatt

SEQ ID NO: 19335 - DNA, 23 bp, Artificial Sequence
  Synthetic
ccgttttttttttttgggcaatt

SEQ ID NO: 19336 - DNA, 23 bp, Artificial Sequence
  Synthetic
ccgttttttttttttgggcaact

SEQ ID NO: 19337 - DNA, 23 bp, Artificial Sequence
  Synthetic
ccgttttttttttttggcaaatc

SEQ ID NO: 19338 - DNA, 23 bp, Artificial Sequence
  Synthetic
ccgttttttttttttggcaaatc

SEQ ID NO: 19339 - DNA, 23 bp, Artificial Sequence
  Synthetic
ccgttttttttttttggcaaatc

SEQ ID NO: 19340 - DNA, 23 bp, Artificial Sequence
  Synthetic
ccgttttttttttttggcaagtc

SEQ ID NO: 19341 - DNA, 23 bp, Artificial Sequence
  Synthetic
ccgttttttttttttgggcagct

SEQ ID NO: 19342 - DNA, 23 bp, Artificial Sequence
  Synthetic
ccgttttttttttttggcaactc

SEQ ID NO: 19343 - DNA, 23 bp, Artificial Sequence
  Synthetic
ccgttttttttttttgggcaaat

SEQ ID NO: 19344 - DNA, 23 bp, Artificial Sequence
  Synthetic
ccgttttttttttttcagggaag

SEQ ID NO: 19345 - DNA, 23 bp, Artificial Sequence
  Synthetic
ccgttttttttttttcagaacaa

SEQ ID NO: 19346 - DNA, 23 bp, Artificial Sequence
  Synthetic
ccgttttttttttttacgatgat

SEQ ID NO: 19347 - DNA, 23 bp, Artificial Sequence
  Synthetic
ccgttttttttttttctctgctt

SEQ ID NO: 19348 - DNA, 23 bp, Artificial Sequence
  Synthetic
ccgttttttttttttacagtgta

SEQ ID NO: 19349 - DNA, 23 bp, Artificial Sequence
  Synthetic
ccgttttttttttttaacaaatt

SEQ ID NO: 19350 - DNA, 23 bp, Artificial Sequence
  Synthetic
ccgttttttttttttcatttcat

SEQ ID NO: 19351 - DNA, 23 bp, Artificial Sequence
  Synthetic
ccgttttttttttttacatcgtc

SEQ ID NO: 19352 - DNA, 23 bp, Artificial Sequence
  Synthetic
ccgttttttttttttatttccgt

SEQ ID NO: 19353 - DNA, 23 bp, Artificial Sequence
  Synthetic
ccgttttttttttttaaggacaa

SEQ ID NO: 19354 - DNA, 23 bp, Artificial Sequence
  Synthetic
ccgttttttttttttactccaat

SEQ ID NO: 19355 - DNA, 23 bp, Artificial Sequence
  Synthetic
ccgttttttttttttgtcaaact

SEQ ID NO: 19356 - DNA, 23 bp, Artificial Sequence
  Synthetic
ccgttttttttttttctataacg

SEQ ID NO: 19357 - DNA, 23 bp, Artificial Sequence
  Synthetic
ccgttttttttttttaacaaccg

SEQ ID NO: 19358 - DNA, 23 bp, Artificial Sequence
  Synthetic
ccgttttttttttttaacaaccg

SEQ ID NO: 19359 - DNA, 23 bp, Artificial Sequence
  Synthetic
ccgttttttttttttaacaaccg

SEQ ID NO: 19360 - DNA, 23 bp, Artificial Sequence
  Synthetic
ccgttttttttttttaacaaccg

SEQ ID NO: 19361 - DNA, 23 bp, Artificial Sequence
  Synthetic
ccgttttttttttttaacaaccg

SEQ ID NO: 19362 - DNA, 23 bp, Artificial Sequence
  Synthetic
ccgttttttttttttaacaaccg

SEQ ID NO: 19363 - DNA, 23 bp, Artificial Sequence
  Synthetic
ccgttttttttttttaacaaccg

SEQ ID NO: 19364 - DNA, 23 bp, Artificial Sequence
  Synthetic
ccgttttttttttttaacaaccg

SEQ ID NO: 19365 - DNA, 23 bp, Artificial Sequence
  Synthetic
ccgttttttttttttaacaaccg

SEQ ID NO: 19366 - DNA, 23 bp, Artificial Sequence
  Synthetic
ccgttttttttttttaacaaccg

SEQ ID NO: 19367 - DNA, 23 bp, Artificial Sequence
  Synthetic
ccgttttttttttttccgatcat

SEQ ID NO: 19368 - DNA, 23 bp, Artificial Sequence
  Synthetic
ccgttttttttttttcacattta

SEQ ID NO: 19369 - DNA, 23 bp, Artificial Sequence
  Synthetic
ccgttttttttttttcacattta

SEQ ID NO: 19370 - DNA, 23 bp, Artificial Sequence
  Synthetic
ccgttttttttttttcacattta

SEQ ID NO: 19371 - DNA, 23 bp, Artificial Sequence
  Synthetic
ccgttttttttttttgtctcgca

SEQ ID NO: 19372 - DNA, 23 bp, Artificial Sequence
  Synthetic
ccgttttttttttttagatttat

SEQ ID NO: 19373 - DNA, 23 bp, Artificial Sequence
  Synthetic
ccgttttttttttttagcaagct

SEQ ID NO: 19374 - DNA, 23 bp, Artificial Sequence
  Synthetic
ccgttttttttttttggatgttt

SEQ ID NO: 19375 - DNA, 23 bp, Artificial Sequence
  Synthetic
ccgttttttttttttggatgttt

SEQ ID NO: 19376 - DNA, 23 bp, Artificial Sequence
  Synthetic
ccgttttttttttttggatgttt

SEQ ID NO: 19377 - DNA, 23 bp, Artificial Sequence
  Synthetic
ccgttttttttttttggatgttt

SEQ ID NO: 19378 - DNA, 23 bp, Artificial Sequence
  Synthetic
ccgttttttttttttggatgttt

SEQ ID NO: 19379 - DNA, 23 bp, Artificial Sequence
  Synthetic
ccgttttttttttttggatgttt

SEQ ID NO: 19380 - DNA, 23 bp, Artificial Sequence
  Synthetic
ccgttttttttttttggatgttt

SEQ ID NO: 19381 - DNA, 23 bp, Artificial Sequence
  Synthetic
ccgttttttttttttggatgttt

SEQ ID NO: 19382 - DNA, 23 bp, Artificial Sequence
  Synthetic
ccgttttttttttttggatgttt

SEQ ID NO: 19383 - DNA, 23 bp, Artificial Sequence
  Synthetic
ccgttttttttttttatttccca

SEQ ID NO: 19384 - DNA, 23 bp, Artificial Sequence
  Synthetic
ccgttttttttttttctctgcat

SEQ ID NO: 19385 - DNA, 23 bp, Artificial Sequence
  Synthetic
ccgttttttttttttagaagaga

SEQ ID NO: 19386 - DNA, 23 bp, Artificial Sequence
  Synthetic
ccgttttttttttttcatctgcc

SEQ ID NO: 19387 - DNA, 23 bp, Artificial Sequence
  Synthetic
ccgttttttttttttgcggcacg

SEQ ID NO: 19388 - DNA, 23 bp, Artificial Sequence
  Synthetic
ccgttttttttttttgtgctctc

SEQ ID NO: 19389 - DNA, 23 bp, Artificial Sequence
  Synthetic
ccgttttttttttttccgttgac

SEQ ID NO: 19390 - DNA, 23 bp, Artificial Sequence
  Synthetic
ccgttttttttttttccgttgac

SEQ ID NO: 19391 - DNA, 23 bp, Artificial Sequence
  Synthetic
ccgttttttttttttccgttgac

SEQ ID NO: 19392 - DNA, 23 bp, Artificial Sequence
  Synthetic
ccgttttttttttttccgttgac

SEQ ID NO: 19393 - DNA, 23 bp, Artificial Sequence
  Synthetic
ccgttttttttttttccgttgac

SEQ ID NO: 19394 - DNA, 23 bp, Artificial Sequence
  Synthetic
ccgttttttttttttccgttgac

SEQ ID NO: 19395 - DNA, 23 bp, Artificial Sequence
  Synthetic
ccgttttttttttttccgttgac

SEQ ID NO: 19396 - DNA, 23 bp, Artificial Sequence
  Synthetic
ccgttttttttttttccgttgac

SEQ ID NO: 19397 - DNA, 23 bp, Artificial Sequence
  Synthetic
ccgttttttttttttattcacct

SEQ ID NO: 19398 - DNA, 23 bp, Artificial Sequence
  Synthetic
ccgttttttttttttattcacct

SEQ ID NO: 19399 - DNA, 23 bp, Artificial Sequence
  Synthetic
ccgttttttttttttattcacct

SEQ ID NO: 19400 - DNA, 23 bp, Artificial Sequence
  Synthetic
ccgttttttttttttcatttccc

SEQ ID NO: 19401 - DNA, 23 bp, Artificial Sequence
  Synthetic
ccgttttttttttttaacatttc

SEQ ID NO: 19402 - DNA, 23 bp, Artificial Sequence
  Synthetic
ccgttttttttttttaacatttc

SEQ ID NO: 19403 - DNA, 23 bp, Artificial Sequence
  Synthetic
ccgttttttttttttaacatttc

SEQ ID NO: 19404 - DNA, 23 bp, Artificial Sequence
  Synthetic
ccgttttttttttttaacatttc

SEQ ID NO: 19405 - DNA, 23 bp, Artificial Sequence
  Synthetic
ccgttttttttttttaacatttc

SEQ ID NO: 19406 - DNA, 23 bp, Artificial Sequence
  Synthetic
ccgttttttttttttaacatttc

SEQ ID NO: 19407 - DNA, 23 bp, Artificial Sequence
  Synthetic
ccgttttttttttttaacatttc

SEQ ID NO: 19408 - DNA, 23 bp, Artificial Sequence
  Synthetic
ccgttttttttttttaacatttc

SEQ ID NO: 19409 - DNA, 23 bp, Artificial Sequence
  Synthetic
ccgttttttttttttacatgtgg

SEQ ID NO: 19410 - DNA, 23 bp, Artificial Sequence
  Synthetic
ccgttttttttttttgtccattt

SEQ ID NO: 19411 - DNA, 23 bp, Artificial Sequence
  Synthetic
ccgttttttttttttgtccattt

SEQ ID NO: 19412 - DNA, 23 bp, Artificial Sequence
  Synthetic
ccgttttttttttttgtccattt

SEQ ID NO: 19413 - DNA, 23 bp, Artificial Sequence
  Synthetic
ccgttttttttttttcaacgttt

SEQ ID NO: 19414 - DNA, 23 bp, Artificial Sequence
  Synthetic
ccgttttttttttttcaacgttt

SEQ ID NO: 19415 - DNA, 23 bp, Artificial Sequence
  Synthetic
ccgttttttttttttcaacgttt

SEQ ID NO: 19416 - DNA, 23 bp, Artificial Sequence
  Synthetic
ccgttttttttttttcaacgttt

SEQ ID NO: 19417 - DNA, 23 bp, Artificial Sequence
  Synthetic
ccgttttttttttttcaacgttt

SEQ ID NO: 19418 - DNA, 23 bp, Artificial Sequence
  Synthetic
ccgttttttttttttaaaaccca

SEQ ID NO: 19419 - DNA, 23 bp, Artificial Sequence
  Synthetic
ccgttttttttttttattcgttg

SEQ ID NO: 19420 - DNA, 23 bp, Artificial Sequence
  Synthetic
ccgttttttttttttattcgttg

SEQ ID NO: 19421 - DNA, 23 bp, Artificial Sequence
  Synthetic
ccgttttttttttttattcgttg

SEQ ID NO: 19422 - DNA, 23 bp, Artificial Sequence
  Synthetic
ccgttttttttttttcaatctcc

SEQ ID NO: 19423 - DNA, 23 bp, Artificial Sequence
  Synthetic
ccgttttttttttttcaatctcc

SEQ ID NO: 19424 - DNA, 23 bp, Artificial Sequence
  Synthetic
ccgttttttttttttcaatctcc

SEQ ID NO: 19425 - DNA, 23 bp, Artificial Sequence
  Synthetic
ccgttttttttttttagtaaaat

SEQ ID NO: 19426 - DNA, 23 bp, Artificial Sequence
  Synthetic
ccgttttttttttttatcgggcc

SEQ ID NO: 19427 - DNA, 23 bp, Artificial Sequence
  Synthetic
ccgttttttttttttgtcccata

SEQ ID NO: 19428 - DNA, 23 bp, Artificial Sequence
  Synthetic
ccgttttttttttttgtcccata

SEQ ID NO: 19429 - DNA, 23 bp, Artificial Sequence
  Synthetic
ccgttttttttttttgtcccata

SEQ ID NO: 19430 - DNA, 23 bp, Artificial Sequence
  Synthetic
ccgttttttttttttgtcccata

SEQ ID NO: 19431 - DNA, 23 bp, Artificial Sequence
  Synthetic
ccgttttttttttttgtcccata

SEQ ID NO: 19432 - DNA, 23 bp, Artificial Sequence
  Synthetic
ccgttttttttttttagaaagtc

SEQ ID NO: 19433 - DNA, 23 bp, Artificial Sequence
  Synthetic
ccgttttttttttttagaaagtc

SEQ ID NO: 19434 - DNA, 23 bp, Artificial Sequence
  Synthetic
ccgttttttttttttagaaagtc

SEQ ID NO: 19435 - DNA, 23 bp, Artificial Sequence
  Synthetic
ccgttttttttttttagaaagtc

SEQ ID NO: 19436 - DNA, 23 bp, Artificial Sequence
  Synthetic
ccgttttttttttttagaaagtc

SEQ ID NO: 19437 - DNA, 23 bp, Artificial Sequence
  Synthetic
ccgttttttttttttagaaagtc

SEQ ID NO: 19438 - DNA, 23 bp, Artificial Sequence
  Synthetic
ccgttttttttttttagaaagtc

SEQ ID NO: 19439 - DNA, 23 bp, Artificial Sequence
  Synthetic
ccgttttttttttttagaaagtc

SEQ ID NO: 19440 - DNA, 23 bp, Artificial Sequence
  Synthetic
ccgttttttttttttagaaagtc

SEQ ID NO: 19441 - DNA, 23 bp, Artificial Sequence
  Synthetic
ccgttttttttttttagaaagtc

SEQ ID NO: 19442 - DNA, 23 bp, Artificial Sequence
  Synthetic
ccgttttttttttttagaaagtc

SEQ ID NO: 19443 - DNA, 23 bp, Artificial Sequence
  Synthetic
ccgttttttttttttggtccatc

SEQ ID NO: 19444 - DNA, 23 bp, Artificial Sequence
  Synthetic
ccgttttttttttttggtccatc

SEQ ID NO: 19445 - DNA, 23 bp, Artificial Sequence
  Synthetic
ccgttttttttttttggtccatc

SEQ ID NO: 19446 - DNA, 23 bp, Artificial Sequence
  Synthetic
ccgttttttttttttaacttttt

SEQ ID NO: 19447 - DNA, 23 bp, Artificial Sequence
  Synthetic
ccgttttttttttttaacttttt

SEQ ID NO: 19448 - DNA, 23 bp, Artificial Sequence
  Synthetic
ccgttttttttttttaacttttt

SEQ ID NO: 19449 - DNA, 23 bp, Artificial Sequence
  Synthetic
ccgttttttttttttatacttct

SEQ ID NO: 19450 - DNA, 23 bp, Artificial Sequence
  Synthetic
ccgttttttttttttcaagttcg

SEQ ID NO: 19451 - DNA, 23 bp, Artificial Sequence
  Synthetic
ccgttttttttttttagttatca

SEQ ID NO: 19452 - DNA, 23 bp, Artificial Sequence
  Synthetic
ccgttttttttttttagccctgt

SEQ ID NO: 19453 - DNA, 23 bp, Artificial Sequence
  Synthetic
ccgttttttttttttaggagtct

SEQ ID NO: 19454 - DNA, 23 bp, Artificial Sequence
  Synthetic
ccgttttttttttttacctgcac

SEQ ID NO: 19455 - DNA, 23 bp, Artificial Sequence
  Synthetic
ccgttttttttttttgcactgtc

SEQ ID NO: 19456 - DNA, 23 bp, Artificial Sequence
  Synthetic
ccgttttttttttttagccctgt

SEQ ID NO: 19457 - DNA, 23 bp, Artificial Sequence
  Synthetic
ccgttttttttttttcaaattcg

SEQ ID NO: 19458 - DNA, 23 bp, Artificial Sequence
  Synthetic
ccgttttttttttttaaattcgg

SEQ ID NO: 19459 - DNA, 23 bp, Artificial Sequence
  Synthetic
ccgttttttttttttcattcacc

SEQ ID NO: 19460 - DNA, 23 bp, Artificial Sequence
  Synthetic
ccgttttttttttttcaagttag

SEQ ID NO: 19461 - DNA, 23 bp, Artificial Sequence
  Synthetic
ccgttttttttttttaagagacc

SEQ ID NO: 19462 - DNA, 23 bp, Artificial Sequence
  Synthetic
ccgttttttttttttccttttaa

SEQ ID NO: 19463 - DNA, 23 bp, Artificial Sequence
  Synthetic
ccgttttttttttttagctggtt

SEQ ID NO: 19464 - DNA, 23 bp, Artificial Sequence
  Synthetic
ccgttttttttttttctctggtc

SEQ ID NO: 19465 - DNA, 23 bp, Artificial Sequence
  Synthetic
ccgttttttttttttcataggaa

SEQ ID NO: 19466 - DNA, 23 bp, Artificial Sequence
  Synthetic
ccgttttttttttttatcatcaa

SEQ ID NO: 19467 - DNA, 23 bp, Artificial Sequence
  Synthetic
ccgttttttttttttacacgtgc

SEQ ID NO: 19468 - DNA, 23 bp, Artificial Sequence
  Synthetic
ccgttttttttttttatctttac

SEQ ID NO: 19469 - DNA, 23 bp, Artificial Sequence
  Synthetic
ccgttttttttttttgctacagt

SEQ ID NO: 19470 - DNA, 23 bp, Artificial Sequence
  Synthetic
ccgttttttttttttgtacatca

SEQ ID NO: 19471 - DNA, 23 bp, Artificial Sequence
  Synthetic
ccgttttttttttttagaagcat

SEQ ID NO: 19472 - DNA, 23 bp, Artificial Sequence
  Synthetic
ccgttttttttttttaaggcaac

SEQ ID NO: 19473 - DNA, 23 bp, Artificial Sequence
  Synthetic
ccgttttttttttttcaaaccat

SEQ ID NO: 19474 - DNA, 23 bp, Artificial Sequence
  Synthetic
ccgttttttttttttaaccatga

SEQ ID NO: 19475 - DNA, 23 bp, Artificial Sequence
  Synthetic
ccgttttttttttttccaatatt

SEQ ID NO: 19476 - DNA, 23 bp, Artificial Sequence
  Synthetic
ccgttttttttttttaagtgcct

SEQ ID NO: 19477 - DNA, 23 bp, Artificial Sequence
  Synthetic
ccgttttttttttttacctgcac

SEQ ID NO: 19478 - DNA, 23 bp, Artificial Sequence
  Synthetic
ccgttttttttttttgcactaga

SEQ ID NO: 19479 - DNA, 23 bp, Artificial Sequence
  Synthetic
ccgttttttttttttcaccgaca

SEQ ID NO: 19480 - DNA, 23 bp, Artificial Sequence
  Synthetic
ccgttttttttttttacaatcaa

SEQ ID NO: 19481 - DNA, 23 bp, Artificial Sequence
  Synthetic
ccgttttttttttttcccaccga

SEQ ID NO: 19482 - DNA, 23 bp, Artificial Sequence
  Synthetic
ccgttttttttttttcaccgaca

SEQ ID NO: 19483 - DNA, 23 bp, Artificial Sequence
  Synthetic
ccgttttttttttttgtgaattc

SEQ ID NO: 19484 - DNA, 23 bp, Artificial Sequence
  Synthetic
ccgttttttttttttgcccaaaa

SEQ ID NO: 19485 - DNA, 23 bp, Artificial Sequence
  Synthetic
ccgttttttttttttgctgcaac

SEQ ID NO: 19486 - DNA, 23 bp, Artificial Sequence
  Synthetic
ccgttttttttttttcctccacc

SEQ ID NO: 19487 - DNA, 23 bp, Artificial Sequence
  Synthetic
ccgttttttttttttgatatcag

SEQ ID NO: 19488 - DNA, 23 bp, Artificial Sequence
  Synthetic
ccgttttttttttttctaatata

SEQ ID NO: 19489 - DNA, 23 bp, Artificial Sequence
  Synthetic
ccgttttttttttttcaatattt

SEQ ID NO: 19490 - DNA, 23 bp, Artificial Sequence
  Synthetic
ccgttttttttttttcaacaaca

SEQ ID NO: 19491 - DNA, 23 bp, Artificial Sequence
  Synthetic
ccgttttttttttttgggtggag

SEQ ID NO: 19492 - DNA, 23 bp, Artificial Sequence
  Synthetic
ccgttttttttttttatctcccc

SEQ ID NO: 19493 - DNA, 23 bp, Artificial Sequence
  Synthetic
ccgttttttttttttacaggtag

SEQ ID NO: 19494 - DNA, 23 bp, Artificial Sequence
  Synthetic
ccgttttttttttttgttttgca

SEQ ID NO: 19495 - DNA, 23 bp, Artificial Sequence
  Synthetic
ccgttttttttttttgttttgca

SEQ ID NO: 19496 - DNA, 23 bp, Artificial Sequence
  Synthetic
ccgttttttttttttctgcacta

SEQ ID NO: 19497 - DNA, 23 bp, Artificial Sequence
  Synthetic
ccgttttttttttttgcatagga

SEQ ID NO: 19498 - DNA, 23 bp, Artificial Sequence
  Synthetic
ccgttttttttttttgactccgg

SEQ ID NO: 19499 - DNA, 23 bp, Artificial Sequence
  Synthetic
ccgttttttttttttacatcagt

SEQ ID NO: 19500 - DNA, 23 bp, Artificial Sequence
  Synthetic
ccgttttttttttttcctgtctg

SEQ ID NO: 19501 - DNA, 23 bp, Artificial Sequence
  Synthetic
ccgttttttttttttcagttgcc

SEQ ID NO: 19502 - DNA, 23 bp, Artificial Sequence
  Synthetic
ccgttttttttttttcaatcagt

SEQ ID NO: 19503 - DNA, 23 bp, Artificial Sequence
  Synthetic
ccgttttttttttttatggttag

SEQ ID NO: 19504 - DNA, 23 bp, Artificial Sequence
  Synthetic
ccgttttttttttttagttcttc

SEQ ID NO: 19505 - DNA, 23 bp, Artificial Sequence
  Synthetic
ccgttttttttttttagtgtcag

SEQ ID NO: 19506 - DNA, 23 bp, Artificial Sequence
  Synthetic
ccgttttttttttttaacccagc

SEQ ID NO: 19507 - DNA, 23 bp, Artificial Sequence
  Synthetic
ccgttttttttttttggtatttg

SEQ ID NO: 19508 - DNA, 23 bp, Artificial Sequence
  Synthetic
ccgttttttttttttacggaacc

SEQ ID NO: 19509 - DNA, 23 bp, Artificial Sequence
  Synthetic
ccgttttttttttttaaatccct

SEQ ID NO: 19510 - DNA, 23 bp, Artificial Sequence
  Synthetic
ccgttttttttttttgtaatccc

SEQ ID NO: 19511 - DNA, 23 bp, Artificial Sequence
  Synthetic
ccgttttttttttttcctgctga

SEQ ID NO: 19512 - DNA, 23 bp, Artificial Sequence
  Synthetic
ccgttttttttttttgaccgaga

SEQ ID NO: 19513 - DNA, 23 bp, Artificial Sequence
  Synthetic
ccgttttttttttttcctatcct

SEQ ID NO: 19514 - DNA, 23 bp, Artificial Sequence
  Synthetic
ccgttttttttttttcggaactt

SEQ ID NO: 19515 - DNA, 23 bp, Artificial Sequence
  Synthetic
ccgttttttttttttaatagact

SEQ ID NO: 19516 - DNA, 23 bp, Artificial Sequence
  Synthetic
ccgttttttttttttccgatttc

SEQ ID NO: 19517 - DNA, 23 bp, Artificial Sequence
  Synthetic
ccgttttttttttttgatttcaa

SEQ ID NO: 19518 - DNA, 23 bp, Artificial Sequence
  Synthetic
ccgttttttttttttgcaaacat

SEQ ID NO: 19519 - DNA, 23 bp, Artificial Sequence
  Synthetic
ccgttttttttttttcagtcgag

SEQ ID NO: 19520 - DNA, 23 bp, Artificial Sequence
  Synthetic
ccgttttttttttttgagtgtag

SEQ ID NO: 19521 - DNA, 23 bp, Artificial Sequence
  Synthetic
ccgttttttttttttcagtcggg

SEQ ID NO: 19522 - DNA, 23 bp, Artificial Sequence
  Synthetic
ccgttttttttttttgctatgcc

SEQ ID NO: 19523 - DNA, 23 bp, Artificial Sequence
  Synthetic
ccgttttttttttttaacttagt

SEQ ID NO: 19524 - DNA, 23 bp, Artificial Sequence
  Synthetic
ccgttttttttttttatgcaact

SEQ ID NO: 19525 - DNA, 23 bp, Artificial Sequence
  Synthetic
ccgttttttttttttaaccagct

SEQ ID NO: 19526 - DNA, 23 bp, Artificial Sequence
  Synthetic
ccgttttttttttttcaaaatca

SEQ ID NO: 19527 - DNA, 23 bp, Artificial Sequence
  Synthetic
ccgttttttttttttaggccggg

SEQ ID NO: 19528 - DNA, 23 bp, Artificial Sequence
  Synthetic
ccgttttttttttttcctgcacg

SEQ ID NO: 19529 - DNA, 23 bp, Artificial Sequence
  Synthetic
ccgttttttttttttcaataaat

SEQ ID NO: 19530 - DNA, 23 bp, Artificial Sequence
  Synthetic
ccgttttttttttttaaaaatgt

SEQ ID NO: 19531 - DNA, 23 bp, Artificial Sequence
  Synthetic
ccgttttttttttttcaatacaa

SEQ ID NO: 19532 - DNA, 23 bp, Artificial Sequence
  Synthetic
ccgttttttttttttcaagatcg

SEQ ID NO: 19533 - DNA, 23 bp, Artificial Sequence
  Synthetic
ccgttttttttttttctcccaca

SEQ ID NO: 19534 - DNA, 23 bp, Artificial Sequence
  Synthetic
ccgttttttttttttcataacca

SEQ ID NO: 19535 - DNA, 23 bp, Artificial Sequence
  Synthetic
ccgttttttttttttcattctat

SEQ ID NO: 19536 - DNA, 23 bp, Artificial Sequence
  Synthetic
ccgttttttttttttccacgaag

SEQ ID NO: 19537 - DNA, 23 bp, Artificial Sequence
  Synthetic
ccgttttttttttttccgcgaga

SEQ ID NO: 19538 - DNA, 23 bp, Artificial Sequence
  Synthetic
ccgttttttttttttatacagtt

SEQ ID NO: 19539 - DNA, 23 bp, Artificial Sequence
  Synthetic
ccgttttttttttttacaagcgc

SEQ ID NO: 19540 - DNA, 23 bp, Artificial Sequence
  Synthetic
ccgttttttttttttacatcatg

SEQ ID NO: 19541 - DNA, 23 bp, Artificial Sequence
  Synthetic
ccgttttttttttttgaggccta

SEQ ID NO: 19542 - DNA, 23 bp, Artificial Sequence
  Synthetic
ccgttttttttttttgctagtga

SEQ ID NO: 19543 - DNA, 23 bp, Artificial Sequence
  Synthetic
ccgttttttttttttgctagtga

SEQ ID NO: 19544 - DNA, 23 bp, Artificial Sequence
  Synthetic
ccgttttttttttttgctagtga

SEQ ID NO: 19545 - DNA, 23 bp, Artificial Sequence
  Synthetic
ccgttttttttttttgctagtga

SEQ ID NO: 19546 - DNA, 23 bp, Artificial Sequence
  Synthetic
ccgttttttttttttaactcctc

SEQ ID NO: 19547 - DNA, 23 bp, Artificial Sequence
  Synthetic
ccgttttttttttttaactcctc

SEQ ID NO: 19548 - DNA, 23 bp, Artificial Sequence
  Synthetic
ccgttttttttttttccctgcac

SEQ ID NO: 19549 - DNA, 23 bp, Artificial Sequence
  Synthetic
ccgttttttttttttccaatgaa

SEQ ID NO: 19550 - DNA, 23 bp, Artificial Sequence
  Synthetic
ccgttttttttttttaggtgtat

SEQ ID NO: 19551 - DNA, 23 bp, Artificial Sequence
  Synthetic
ccgttttttttttttctcactct

SEQ ID NO: 19552 - DNA, 23 bp, Artificial Sequence
  Synthetic
ccgttttttttttttagctccct

SEQ ID NO: 19553 - DNA, 23 bp, Artificial Sequence
  Synthetic
ccgttttttttttttagctccct

SEQ ID NO: 19554 - DNA, 23 bp, Artificial Sequence
  Synthetic
ccgttttttttttttgagctccc

SEQ ID NO: 19555 - DNA, 23 bp, Artificial Sequence
  Synthetic
ccgttttttttttttgagctccc

SEQ ID NO: 19556 - DNA, 23 bp, Artificial Sequence
  Synthetic
ccgttttttttttttcgctatcc

SEQ ID NO: 19557 - DNA, 23 bp, Artificial Sequence
  Synthetic
ccgttttttttttttcgctatcc

SEQ ID NO: 19558 - DNA, 23 bp, Artificial Sequence
  Synthetic
ccgttttttttttttcgctatcc

SEQ ID NO: 19559 - DNA, 23 bp, Artificial Sequence
  Synthetic
ccgttttttttttttctcacagc

SEQ ID NO: 19560 - DNA, 23 bp, Artificial Sequence
  Synthetic
ccgttttttttttttctcacagc

SEQ ID NO: 19561 - DNA, 23 bp, Artificial Sequence
  Synthetic
ccgttttttttttttgcaactgc

SEQ ID NO: 19562 - DNA, 23 bp, Artificial Sequence
  Synthetic
ccgttttttttttttgtgctctc

SEQ ID NO: 19563 - DNA, 23 bp, Artificial Sequence
  Synthetic
ccgttttttttttttgtgctctc

SEQ ID NO: 19564 - DNA, 23 bp, Artificial Sequence
  Synthetic
ccgttttttttttttgtgctctc

SEQ ID NO: 19565 - DNA, 23 bp, Artificial Sequence
  Synthetic
ccgttttttttttttcgtgctct

SEQ ID NO: 19566 - DNA, 23 bp, Artificial Sequence
  Synthetic
ccgttttttttttttcacacagc

SEQ ID NO: 19567 - DNA, 23 bp, Artificial Sequence
  Synthetic
ccgttttttttttttcctgtaga

SEQ ID NO: 19568 - DNA, 23 bp, Artificial Sequence
  Synthetic
ccgttttttttttttcctgtaga

SEQ ID NO: 19569 - DNA, 23 bp, Artificial Sequence
  Synthetic
ccgttttttttttttagacatag

SEQ ID NO: 19570 - DNA, 23 bp, Artificial Sequence
  Synthetic
ccgttttttttttttagacatag

SEQ ID NO: 19571 - DNA, 23 bp, Artificial Sequence
  Synthetic
ccgttttttttttttagacatag

SEQ ID NO: 19572 - DNA, 23 bp, Artificial Sequence
  Synthetic
ccgttttttttttttcaagttcg

SEQ ID NO: 19573 - DNA, 23 bp, Artificial Sequence
  Synthetic
ccgttttttttttttagttatca

SEQ ID NO: 19574 - DNA, 23 bp, Artificial Sequence
  Synthetic
ccgttttttttttttagccctgt

SEQ ID NO: 19575 - DNA, 23 bp, Artificial Sequence
  Synthetic
ccgttttttttttttaggagtct

SEQ ID NO: 19576 - DNA, 23 bp, Artificial Sequence
  Synthetic
ccgttttttttttttacctgcac

SEQ ID NO: 19577 - DNA, 23 bp, Artificial Sequence
  Synthetic
ccgttttttttttttgcactgtc

SEQ ID NO: 19578 - DNA, 23 bp, Artificial Sequence
  Synthetic
ccgttttttttttttagccctgt

SEQ ID NO: 19579 - DNA, 23 bp, Artificial Sequence
  Synthetic
ccgttttttttttttcaaattcg

SEQ ID NO: 19580 - DNA, 23 bp, Artificial Sequence
  Synthetic
ccgttttttttttttcattcacc

SEQ ID NO: 19581 - DNA, 23 bp, Artificial Sequence
  Synthetic
ccgttttttttttttcaagttag

SEQ ID NO: 19582 - DNA, 23 bp, Artificial Sequence
  Synthetic
ccgttttttttttttccaagctc

SEQ ID NO: 19583 - DNA, 23 bp, Artificial Sequence
  Synthetic
ccgttttttttttttaagagacc

SEQ ID NO: 19584 - DNA, 23 bp, Artificial Sequence
  Synthetic
ccgttttttttttttagctggtt

SEQ ID NO: 19585 - DNA, 23 bp, Artificial Sequence
  Synthetic
ccgttttttttttttctctggtc

SEQ ID NO: 19586 - DNA, 23 bp, Artificial Sequence
  Synthetic
ccgttttttttttttcataggaa

SEQ ID NO: 19587 - DNA, 23 bp, Artificial Sequence
  Synthetic
ccgttttttttttttatcatcaa

SEQ ID NO: 19588 - DNA, 23 bp, Artificial Sequence
  Synthetic
ccgttttttttttttatctttac

SEQ ID NO: 19589 - DNA, 23 bp, Artificial Sequence
  Synthetic
ccgttttttttttttgctacagt

SEQ ID NO: 19590 - DNA, 23 bp, Artificial Sequence
  Synthetic
ccgttttttttttttgtacatca

SEQ ID NO: 19591 - DNA, 23 bp, Artificial Sequence
  Synthetic
ccgttttttttttttgggattcc

SEQ ID NO: 19592 - DNA, 23 bp, Artificial Sequence
  Synthetic
ccgttttttttttttagaagcat

SEQ ID NO: 19593 - DNA, 23 bp, Artificial Sequence
  Synthetic
ccgttttttttttttcttttgtg

SEQ ID NO: 19594 - DNA, 23 bp, Artificial Sequence
  Synthetic
ccgttttttttttttaaggcaac

SEQ ID NO: 19595 - DNA, 23 bp, Artificial Sequence
  Synthetic
ccgttttttttttttcaaaccat

SEQ ID NO: 19596 - DNA, 23 bp, Artificial Sequence
  Synthetic
ccgttttttttttttaaccatga

SEQ ID NO: 19597 - DNA, 23 bp, Artificial Sequence
  Synthetic
ccgttttttttttttccaatatt

SEQ ID NO: 19598 - DNA, 23 bp, Artificial Sequence
  Synthetic
ccgttttttttttttaagtgcct

SEQ ID NO: 19599 - DNA, 23 bp, Artificial Sequence
  Synthetic
ccgttttttttttttacctgcac

SEQ ID NO: 19600 - DNA, 23 bp, Artificial Sequence
  Synthetic
ccgttttttttttttgcactaga

SEQ ID NO: 19601 - DNA, 23 bp, Artificial Sequence
  Synthetic
ccgttttttttttttcaccgaca

SEQ ID NO: 19602 - DNA, 23 bp, Artificial Sequence
  Synthetic
ccgttttttttttttacaatcaa

SEQ ID NO: 19603 - DNA, 23 bp, Artificial Sequence
  Synthetic
ccgttttttttttttcccaccga

SEQ ID NO: 19604 - DNA, 23 bp, Artificial Sequence
  Synthetic
ccgttttttttttttagttctac

SEQ ID NO: 19605 - DNA, 23 bp, Artificial Sequence
  Synthetic
ccgttttttttttttccttatca

SEQ ID NO: 19606 - DNA, 23 bp, Artificial Sequence
  Synthetic
ccgttttttttttttgctgcaac

SEQ ID NO: 19607 - DNA, 23 bp, Artificial Sequence
  Synthetic
ccgttttttttttttcctccacc

SEQ ID NO: 19608 - DNA, 23 bp, Artificial Sequence
  Synthetic
ccgttttttttttttgatatcag

SEQ ID NO: 19609 - DNA, 23 bp, Artificial Sequence
  Synthetic
ccgttttttttttttacatggag

SEQ ID NO: 19610 - DNA, 23 bp, Artificial Sequence
  Synthetic
ccgttttttttttttaacaacat

SEQ ID NO: 19611 - DNA, 23 bp, Artificial Sequence
  Synthetic
ccgttttttttttttcaacaaca

SEQ ID NO: 19612 - DNA, 23 bp, Artificial Sequence
  Synthetic
ccgttttttttttttgggtggag

SEQ ID NO: 19613 - DNA, 23 bp, Artificial Sequence
  Synthetic
ccgttttttttttttatctcccc

SEQ ID NO: 19614 - DNA, 23 bp, Artificial Sequence
  Synthetic
ccgttttttttttttacaggtag

SEQ ID NO: 19615 - DNA, 23 bp, Artificial Sequence
  Synthetic
ccgttttttttttttgttttgca

SEQ ID NO: 19616 - DNA, 23 bp, Artificial Sequence
  Synthetic
ccgttttttttttttgttttgca

SEQ ID NO: 19617 - DNA, 23 bp, Artificial Sequence
  Synthetic
ccgttttttttttttctgcacta

SEQ ID NO: 19618 - DNA, 23 bp, Artificial Sequence
  Synthetic
ccgttttttttttttatcattac

SEQ ID NO: 19619 - DNA, 23 bp, Artificial Sequence
  Synthetic
ccgttttttttttttgcatagga

SEQ ID NO: 19620 - DNA, 23 bp, Artificial Sequence
  Synthetic
ccgttttttttttttacacactt

SEQ ID NO: 19621 - DNA, 23 bp, Artificial Sequence
  Synthetic
ccgttttttttttttacatcagt

SEQ ID NO: 19622 - DNA, 23 bp, Artificial Sequence
  Synthetic
ccgttttttttttttgcgaagga

SEQ ID NO: 19623 - DNA, 23 bp, Artificial Sequence
  Synthetic
ccgttttttttttttcctgtctg

SEQ ID NO: 19624 - DNA, 23 bp, Artificial Sequence
  Synthetic
ccgttttttttttttgtcaattc

SEQ ID NO: 19625 - DNA, 23 bp, Artificial Sequence
  Synthetic
ccgttttttttttttcagttgcc

SEQ ID NO: 19626 - DNA, 23 bp, Artificial Sequence
  Synthetic
ccgttttttttttttatggttag

SEQ ID NO: 19627 - DNA, 23 bp, Artificial Sequence
  Synthetic
ccgttttttttttttaattgcgt

SEQ ID NO: 19628 - DNA, 23 bp, Artificial Sequence
  Synthetic
ccgttttttttttttagttcttc

SEQ ID NO: 19629 - DNA, 23 bp, Artificial Sequence
  Synthetic
ccgttttttttttttaacccagc

SEQ ID NO: 19630 - DNA, 23 bp, Artificial Sequence
  Synthetic
ccgttttttttttttggtatttg

SEQ ID NO: 19631 - DNA, 23 bp, Artificial Sequence
  Synthetic
ccgttttttttttttacggaacc

SEQ ID NO: 19632 - DNA, 23 bp, Artificial Sequence
  Synthetic
ccgttttttttttttaaatccct

SEQ ID NO: 19633 - DNA, 23 bp, Artificial Sequence
  Synthetic
ccgttttttttttttgtaatccc

SEQ ID NO: 19634 - DNA, 23 bp, Artificial Sequence
  Synthetic
ccgttttttttttttcctgctga

SEQ ID NO: 19635 - DNA, 23 bp, Artificial Sequence
  Synthetic
ccgttttttttttttgaccgaga

SEQ ID NO: 19636 - DNA, 23 bp, Artificial Sequence
  Synthetic
ccgttttttttttttcctatcct

SEQ ID NO: 19637 - DNA, 23 bp, Artificial Sequence
  Synthetic
ccgttttttttttttcggaactt

SEQ ID NO: 19638 - DNA, 23 bp, Artificial Sequence
  Synthetic
ccgttttttttttttaatagact

SEQ ID NO: 19639 - DNA, 23 bp, Artificial Sequence
  Synthetic
ccgttttttttttttccgatttc

SEQ ID NO: 19640 - DNA, 23 bp, Artificial Sequence
  Synthetic
ccgttttttttttttgatttcaa

SEQ ID NO: 19641 - DNA, 23 bp, Artificial Sequence
  Synthetic
ccgttttttttttttgcaaacat

SEQ ID NO: 19642 - DNA, 23 bp, Artificial Sequence
  Synthetic
ccgttttttttttttcagtcgag

SEQ ID NO: 19643 - DNA, 23 bp, Artificial Sequence
  Synthetic
ccgttttttttttttgctatgcc

SEQ ID NO: 19644 - DNA, 23 bp, Artificial Sequence
  Synthetic
ccgttttttttttttaacttagt

SEQ ID NO: 19645 - DNA, 23 bp, Artificial Sequence
  Synthetic
ccgttttttttttttatgcaact

SEQ ID NO: 19646 - DNA, 23 bp, Artificial Sequence
  Synthetic
ccgttttttttttttaaccagct

SEQ ID NO: 19647 - DNA, 23 bp, Artificial Sequence
  Synthetic
ccgttttttttttttcaaaatca

SEQ ID NO: 19648 - DNA, 23 bp, Artificial Sequence
  Synthetic
ccgttttttttttttaggccggg

SEQ ID NO: 19649 - DNA, 23 bp, Artificial Sequence
  Synthetic
ccgttttttttttttcctgcacg

SEQ ID NO: 19650 - DNA, 23 bp, Artificial Sequence
  Synthetic
ccgttttttttttttcaataaat

SEQ ID NO: 19651 - DNA, 23 bp, Artificial Sequence
  Synthetic
ccgttttttttttttcaatacaa

SEQ ID NO: 19652 - DNA, 23 bp, Artificial Sequence
  Synthetic
ccgttttttttttttcaagatcg

SEQ ID NO: 19653 - DNA, 23 bp, Artificial Sequence
  Synthetic
ccgttttttttttttctcactct

SEQ ID NO: 19654 - DNA, 23 bp, Artificial Sequence
  Synthetic
ccgttttttttttttctcactct

SEQ ID NO: 19655 - DNA, 23 bp, Artificial Sequence
  Synthetic
ccgttttttttttttctcactct

SEQ ID NO: 19656 - DNA, 23 bp, Artificial Sequence
  Synthetic
ccgttttttttttttctcactct

SEQ ID NO: 19657 - DNA, 23 bp, Artificial Sequence
  Synthetic
ccgttttttttttttctcactct

SEQ ID NO: 19658 - DNA, 23 bp, Artificial Sequence
  Synthetic
ccgttttttttttttctcactct

SEQ ID NO: 19659 - DNA, 23 bp, Artificial Sequence
  Synthetic
ccgttttttttttttctctctat

SEQ ID NO: 19660 - DNA, 23 bp, Artificial Sequence
  Synthetic
ccgttttttttttttctctctat

SEQ ID NO: 19661 - DNA, 23 bp, Artificial Sequence
  Synthetic
ccgttttttttttttctctctat

SEQ ID NO: 19662 - DNA, 23 bp, Artificial Sequence
  Synthetic
ccgttttttttttttctctctat

SEQ ID NO: 19663 - DNA, 23 bp, Artificial Sequence
  Synthetic
ccgttttttttttttctccctct

SEQ ID NO: 19664 - DNA, 23 bp, Artificial Sequence
  Synthetic
ccgttttttttttttagctccct

SEQ ID NO: 19665 - DNA, 23 bp, Artificial Sequence
  Synthetic
ccgttttttttttttagctccct

SEQ ID NO: 19666 - DNA, 23 bp, Artificial Sequence
  Synthetic
ccgttttttttttttagctccct

SEQ ID NO: 19667 - DNA, 23 bp, Artificial Sequence
  Synthetic
ccgttttttttttttgagctccc

SEQ ID NO: 19668 - DNA, 23 bp, Artificial Sequence
  Synthetic
ccgttttttttttttgagctccc

SEQ ID NO: 19669 - DNA, 23 bp, Artificial Sequence
  Synthetic
ccgttttttttttttagctccct

SEQ ID NO: 19670 - DNA, 23 bp, Artificial Sequence
  Synthetic
ccgttttttttttttcatacagg

SEQ ID NO: 19671 - DNA, 23 bp, Artificial Sequence
  Synthetic
ccgttttttttttttcatacagg

SEQ ID NO: 19672 - DNA, 23 bp, Artificial Sequence
  Synthetic
ccgttttttttttttcatacagg

SEQ ID NO: 19673 - DNA, 23 bp, Artificial Sequence
  Synthetic
ccgttttttttttttcatacagg

SEQ ID NO: 19674 - DNA, 23 bp, Artificial Sequence
  Synthetic
ccgttttttttttttcattcagg

SEQ ID NO: 19675 - DNA, 23 bp, Artificial Sequence
  Synthetic
ccgttttttttttttcattcagg

SEQ ID NO: 19676 - DNA, 23 bp, Artificial Sequence
  Synthetic
ccgttttttttttttcatccagg

SEQ ID NO: 19677 - DNA, 23 bp, Artificial Sequence
  Synthetic
ccgttttttttttttcatgcagg

SEQ ID NO: 19678 - DNA, 23 bp, Artificial Sequence
  Synthetic
ccgttttttttttttgatgcaga

SEQ ID NO: 19679 - DNA, 23 bp, Artificial Sequence
  Synthetic
ccgttttttttttttgatgcaga

SEQ ID NO: 19680 - DNA, 23 bp, Artificial Sequence
  Synthetic
ccgttttttttttttgatgcaga

SEQ ID NO: 19681 - DNA, 23 bp, Artificial Sequence
  Synthetic
ccgttttttttttttacgtgccc

SEQ ID NO: 19682 - DNA, 23 bp, Artificial Sequence
  Synthetic
ccgttttttttttttacgtgccc

SEQ ID NO: 19683 - DNA, 23 bp, Artificial Sequence
  Synthetic
ccgttttttttttttacgtgccc

SEQ ID NO: 19684 - DNA, 23 bp, Artificial Sequence
  Synthetic
ccgttttttttttttacgtgccc

SEQ ID NO: 19685 - DNA, 23 bp, Artificial Sequence
  Synthetic
ccgttttttttttttacgtgccc

SEQ ID NO: 19686 - DNA, 23 bp, Artificial Sequence
  Synthetic
ccgttttttttttttcatgtgcc

SEQ ID NO: 19687 - DNA, 23 bp, Artificial Sequence
  Synthetic
ccgttttttttttttggaatgaa

SEQ ID NO: 19688 - DNA, 23 bp, Artificial Sequence
  Synthetic
ccgttttttttttttggaatgaa

SEQ ID NO: 19689 - DNA, 23 bp, Artificial Sequence
  Synthetic
ccgttttttttttttggaatgaa

SEQ ID NO: 19690 - DNA, 23 bp, Artificial Sequence
  Synthetic
ccgttttttttttttggaatgaa

SEQ ID NO: 19691 - DNA, 23 bp, Artificial Sequence
  Synthetic
ccgttttttttttttggaatgaa

SEQ ID NO: 19692 - DNA, 23 bp, Artificial Sequence
  Synthetic
ccgttttttttttttggaatgaa

SEQ ID NO: 19693 - DNA, 23 bp, Artificial Sequence
  Synthetic
ccgttttttttttttggaatgaa

SEQ ID NO: 19694 - DNA, 23 bp, Artificial Sequence
  Synthetic
ccgttttttttttttggaatgaa

SEQ ID NO: 19695 - DNA, 23 bp, Artificial Sequence
  Synthetic
ccgttttttttttttggaatgaa

SEQ ID NO: 19696 - DNA, 23 bp, Artificial Sequence
  Synthetic
ccgttttttttttttggaatgaa

SEQ ID NO: 19697 - DNA, 23 bp, Artificial Sequence
  Synthetic
ccgttttttttttttggaatgaa

SEQ ID NO: 19698 - DNA, 23 bp, Artificial Sequence
  Synthetic
ccgttttttttttttggaatgaa

SEQ ID NO: 19699 - DNA, 23 bp, Artificial Sequence
  Synthetic
ccgttttttttttttggaatgaa

SEQ ID NO: 19700 - DNA, 23 bp, Artificial Sequence
  Synthetic
ccgttttttttttttggaatgaa

SEQ ID NO: 19701 - DNA, 23 bp, Artificial Sequence
  Synthetic
ccgttttttttttttggaatgaa

SEQ ID NO: 19702 - DNA, 23 bp, Artificial Sequence
  Synthetic
ccgttttttttttttggaatgga

SEQ ID NO: 19703 - DNA, 23 bp, Artificial Sequence
  Synthetic
ccgttttttttttttggaatgaa

SEQ ID NO: 19704 - DNA, 23 bp, Artificial Sequence
  Synthetic
ccgttttttttttttatcatgct

SEQ ID NO: 19705 - DNA, 23 bp, Artificial Sequence
  Synthetic
ccgttttttttttttatcatgct

SEQ ID NO: 19706 - DNA, 23 bp, Artificial Sequence
  Synthetic
ccgttttttttttttatcatgct

SEQ ID NO: 19707 - DNA, 23 bp, Artificial Sequence
  Synthetic
ccgttttttttttttatcatgct

SEQ ID NO: 19708 - DNA, 23 bp, Artificial Sequence
  Synthetic
ccgttttttttttttgatcatgc

SEQ ID NO: 19709 - DNA, 23 bp, Artificial Sequence
  Synthetic
ccgttttttttttttgatcatgc

SEQ ID NO: 19710 - DNA, 23 bp, Artificial Sequence
  Synthetic
ccgttttttttttttgatcatgc

SEQ ID NO: 19711 - DNA, 23 bp, Artificial Sequence
  Synthetic
ccgttttttttttttgatcatgt

SEQ ID NO: 19712 - DNA, 23 bp, Artificial Sequence
  Synthetic
ccgttttttttttttcgacctgc

SEQ ID NO: 19713 - DNA, 23 bp, Artificial Sequence
  Synthetic
ccgttttttttttttcgacctgc

SEQ ID NO: 19714 - DNA, 23 bp, Artificial Sequence
  Synthetic
ccgttttttttttttgcaagtca

SEQ ID NO: 19715 - DNA, 23 bp, Artificial Sequence
  Synthetic
ccgttttttttttttgacaagtc

SEQ ID NO: 19716 - DNA, 23 bp, Artificial Sequence
  Synthetic
ccgttttttttttttgcaagtcg

SEQ ID NO: 19717 - DNA, 23 bp, Artificial Sequence
  Synthetic
ccgttttttttttttgcaagtcg

SEQ ID NO: 19718 - DNA, 23 bp, Artificial Sequence
  Synthetic
ccgttttttttttttgcaagtcg

SEQ ID NO: 19719 - DNA, 23 bp, Artificial Sequence
  Synthetic
ccgttttttttttttgcaagtcg

SEQ ID NO: 19720 - DNA, 23 bp, Artificial Sequence
  Synthetic
ccgttttttttttttgcaagtcg

SEQ ID NO: 19721 - DNA, 23 bp, Artificial Sequence
  Synthetic
ccgttttttttttttgcaagtca

SEQ ID NO: 19722 - DNA, 23 bp, Artificial Sequence
  Synthetic
ccgttttttttttttgcaagtca

SEQ ID NO: 19723 - DNA, 23 bp, Artificial Sequence
  Synthetic
ccgttttttttttttggcaagtc

SEQ ID NO: 19724 - DNA, 23 bp, Artificial Sequence
  Synthetic
ccgttttttttttttggcaagtc

SEQ ID NO: 19725 - DNA, 23 bp, Artificial Sequence
  Synthetic
ccgttttttttttttggcaagtc

SEQ ID NO: 19726 - DNA, 23 bp, Artificial Sequence
  Synthetic
ccgttttttttttttggcaagtc

SEQ ID NO: 19727 - DNA, 23 bp, Artificial Sequence
  Synthetic
ccgttttttttttttggcaagtc

SEQ ID NO: 19728 - DNA, 23 bp, Artificial Sequence
  Synthetic
ccgttttttttttttggcaagtc

SEQ ID NO: 19729 - DNA, 23 bp, Artificial Sequence
  Synthetic
ccgttttttttttttggcaagtc

SEQ ID NO: 19730 - DNA, 23 bp, Artificial Sequence
  Synthetic
ccgttttttttttttggcaagtc

SEQ ID NO: 19731 - DNA, 23 bp, Artificial Sequence
  Synthetic
ccgttttttttttttggcaagtc

SEQ ID NO: 19732 - DNA, 23 bp, Artificial Sequence
  Synthetic
ccgttttttttttttggcaagtc

SEQ ID NO: 19733 - DNA, 23 bp, Artificial Sequence
  Synthetic
ccgttttttttttttgcaagtca

SEQ ID NO: 19734 - DNA, 23 bp, Artificial Sequence
  Synthetic
ccgttttttttttttggcaagtc

SEQ ID NO: 19735 - DNA, 23 bp, Artificial Sequence
  Synthetic
ccgttttttttttttggcaagtc

SEQ ID NO: 19736 - DNA, 23 bp, Artificial Sequence
  Synthetic
ccgttttttttttttggcaagtc

SEQ ID NO: 19737 - DNA, 23 bp, Artificial Sequence
  Synthetic
ccgttttttttttttgcaagtca

SEQ ID NO: 19738 - DNA, 23 bp, Artificial Sequence
  Synthetic
ccgttttttttttttgcaagtca

SEQ ID NO: 19739 - DNA, 23 bp, Artificial Sequence
  Synthetic
ccgttttttttttttggcaagtc

SEQ ID NO: 19740 - DNA, 23 bp, Artificial Sequence
  Synthetic
ccgttttttttttttgcaagtcg

SEQ ID NO: 19741 - DNA, 23 bp, Artificial Sequence
  Synthetic
ccgttttttttttttgcaagtca

SEQ ID NO: 19742 - DNA, 23 bp, Artificial Sequence
  Synthetic
ccgttttttttttttgcaagtca

SEQ ID NO: 19743 - DNA, 23 bp, Artificial Sequence
  Synthetic
ccgttttttttttttagcaagtc

SEQ ID NO: 19744 - DNA, 23 bp, Artificial Sequence
  Synthetic
ccgttttttttttttggcaattc

SEQ ID NO: 19745 - DNA, 23 bp, Artificial Sequence
  Synthetic
ccgttttttttttttggcaaatc

SEQ ID NO: 19746 - DNA, 23 bp, Artificial Sequence
  Synthetic
ccgttttttttttttgatattgg

SEQ ID NO: 19747 - DNA, 23 bp, Artificial Sequence
  Synthetic
ccgttttttttttttgatattgg

SEQ ID NO: 19748 - DNA, 23 bp, Artificial Sequence
  Synthetic
ccgttttttttttttattggcgc

SEQ ID NO: 19749 - DNA, 23 bp, Artificial Sequence
  Synthetic
ccgttttttttttttattggcgc

SEQ ID NO: 19750 - DNA, 23 bp, Artificial Sequence
  Synthetic
ccgttttttttttttattggcac

SEQ ID NO: 19751 - DNA, 23 bp, Artificial Sequence
  Synthetic
ccgttttttttttttattggcac

SEQ ID NO: 19752 - DNA, 23 bp, Artificial Sequence
  Synthetic
ccgttttttttttttattggcac

SEQ ID NO: 19753 - DNA, 23 bp, Artificial Sequence
  Synthetic
ccgttttttttttttattggcac

SEQ ID NO: 19754 - DNA, 23 bp, Artificial Sequence
  Synthetic
ccgttttttttttttattggcac

SEQ ID NO: 19755 - DNA, 23 bp, Artificial Sequence
  Synthetic
ccgttttttttttttattggcgc

SEQ ID NO: 19756 - DNA, 23 bp, Artificial Sequence
  Synthetic
ccgttttttttttttattggcgc

SEQ ID NO: 19757 - DNA, 23 bp, Artificial Sequence
  Synthetic
ccgttttttttttttcagcatca

SEQ ID NO: 19758 - DNA, 23 bp, Artificial Sequence
  Synthetic
ccgttttttttttttcagcatca

SEQ ID NO: 19759 - DNA, 23 bp, Artificial Sequence
  Synthetic
ccgttttttttttttcagcatca

SEQ ID NO: 19760 - DNA, 23 bp, Artificial Sequence
  Synthetic
ccgttttttttttttcagcatca

SEQ ID NO: 19761 - DNA, 23 bp, Artificial Sequence
  Synthetic
ccgttttttttttttcagcatca

SEQ ID NO: 19762 - DNA, 23 bp, Artificial Sequence
  Synthetic
ccgttttttttttttcagcatca

SEQ ID NO: 19763 - DNA, 23 bp, Artificial Sequence
  Synthetic
ccgttttttttttttcagcatca

SEQ ID NO: 19764 - DNA, 23 bp, Artificial Sequence
  Synthetic
ccgttttttttttttcagcatca

SEQ ID NO: 19765 - DNA, 23 bp, Artificial Sequence
  Synthetic
ccgttttttttttttagcatcat

SEQ ID NO: 19766 - DNA, 23 bp, Artificial Sequence
  Synthetic
ccgttttttttttttgagctccc

SEQ ID NO: 19767 - DNA, 23 bp, Artificial Sequence
  Synthetic
ccgttttttttttttgagctccc

SEQ ID NO: 19768 - DNA, 23 bp, Artificial Sequence
  Synthetic
ccgttttttttttttgagctccc

SEQ ID NO: 19769 - DNA, 23 bp, Artificial Sequence
  Synthetic
ccgttttttttttttgagctccc

SEQ ID NO: 19770 - DNA, 23 bp, Artificial Sequence
  Synthetic
ccgttttttttttttgagctccc

SEQ ID NO: 19771 - DNA, 23 bp, Artificial Sequence
  Synthetic
ccgttttttttttttgagctccc

SEQ ID NO: 19772 - DNA, 23 bp, Artificial Sequence
  Synthetic
ccgttttttttttttgagctccc

SEQ ID NO: 19773 - DNA, 23 bp, Artificial Sequence
  Synthetic
ccgttttttttttttgagctccc

SEQ ID NO: 19774 - DNA, 23 bp, Artificial Sequence
  Synthetic
ccgttttttttttttgagctccc

SEQ ID NO: 19775 - DNA, 23 bp, Artificial Sequence
  Synthetic
ccgttttttttttttcgctatcc

SEQ ID NO: 19776 - DNA, 23 bp, Artificial Sequence
  Synthetic
ccgttttttttttttcgctatcc

SEQ ID NO: 19777 - DNA, 23 bp, Artificial Sequence
  Synthetic
ccgttttttttttttcgctatcc

SEQ ID NO: 19778 - DNA, 23 bp, Artificial Sequence
  Synthetic
ccgttttttttttttcgctatcc

SEQ ID NO: 19779 - DNA, 23 bp, Artificial Sequence
  Synthetic
ccgttttttttttttcaatgcga

SEQ ID NO: 19780 - DNA, 23 bp, Artificial Sequence
  Synthetic
ccgttttttttttttcaatgcga

SEQ ID NO: 19781 - DNA, 23 bp, Artificial Sequence
  Synthetic
ccgttttttttttttcaatgcga

SEQ ID NO: 19782 - DNA, 23 bp, Artificial Sequence
  Synthetic
ccgttttttttttttcaatgcga

SEQ ID NO: 19783 - DNA, 23 bp, Artificial Sequence
  Synthetic
ccgttttttttttttaggtggac

SEQ ID NO: 19784 - DNA, 23 bp, Artificial Sequence
  Synthetic
ccgttttttttttttaggtggac

SEQ ID NO: 19785 - DNA, 23 bp, Artificial Sequence
  Synthetic
ccgttttttttttttgttcctcc

SEQ ID NO: 19786 - DNA, 23 bp, Artificial Sequence
  Synthetic
ccgttttttttttttgttccccc

SEQ ID NO: 19787 - DNA, 23 bp, Artificial Sequence
  Synthetic
ccgttttttttttttgttccccc

SEQ ID NO: 19788 - DNA, 23 bp, Artificial Sequence
  Synthetic
ccgttttttttttttgttccccc

SEQ ID NO: 19789 - DNA, 23 bp, Artificial Sequence
  Synthetic
ccgttttttttttttgttccccc

SEQ ID NO: 19790 - DNA, 23 bp, Artificial Sequence
  Synthetic
ccgttttttttttttgttccccc

SEQ ID NO: 19791 - DNA, 23 bp, Artificial Sequence
  Synthetic
ccgttttttttttttgttccccc

SEQ ID NO: 19792 - DNA, 23 bp, Artificial Sequence
  Synthetic
ccgttttttttttttgttccccc

SEQ ID NO: 19793 - DNA, 23 bp, Artificial Sequence
  Synthetic
ccgttttttttttttgttccccc

SEQ ID NO: 19794 - DNA, 23 bp, Artificial Sequence
  Synthetic
ccgttttttttttttgttccccc

SEQ ID NO: 19795 - DNA, 23 bp, Artificial Sequence
  Synthetic
ccgttttttttttttgttcaaga

SEQ ID NO: 19796 - DNA, 23 bp, Artificial Sequence
  Synthetic
ccgttttttttttttgttcaaga

SEQ ID NO: 19797 - DNA, 23 bp, Artificial Sequence
  Synthetic
ccgttttttttttttgttcaaga

SEQ ID NO: 19798 - DNA, 23 bp, Artificial Sequence
  Synthetic
ccgttttttttttttgttcaaga

SEQ ID NO: 19799 - DNA, 23 bp, Artificial Sequence
  Synthetic
ccgttttttttttttgttcaaga

SEQ ID NO: 19800 - DNA, 23 bp, Artificial Sequence
  Synthetic
ccgttttttttttttgttcaaga

SEQ ID NO: 19801 - DNA, 23 bp, Artificial Sequence
  Synthetic
ccgttttttttttttgttcaaga

SEQ ID NO: 19802 - DNA, 23 bp, Artificial Sequence
  Synthetic
ccgttttttttttttcaacgctg

SEQ ID NO: 19803 - DNA, 23 bp, Artificial Sequence
  Synthetic
ccgttttttttttttcaacgctg

SEQ ID NO: 19804 - DNA, 23 bp, Artificial Sequence
  Synthetic
ccgttttttttttttcaaagctc

SEQ ID NO: 19805 - DNA, 23 bp, Artificial Sequence
  Synthetic
ccgttttttttttttggggtgac

SEQ ID NO: 19806 - DNA, 23 bp, Artificial Sequence
  Synthetic
ccgttttttttttttggggcgac

SEQ ID NO: 19807 - DNA, 23 bp, Artificial Sequence
  Synthetic
ccgttttttttttttggggcgac

SEQ ID NO: 19808 - DNA, 23 bp, Artificial Sequence
  Synthetic
ccgttttttttttttgggcaaat

SEQ ID NO: 19809 - DNA, 23 bp, Artificial Sequence
  Synthetic
ccgttttttttttttgggcaaat

SEQ ID NO: 19810 - DNA, 23 bp, Artificial Sequence
  Synthetic
ccgttttttttttttgggcaaat

SEQ ID NO: 19811 - DNA, 23 bp, Artificial Sequence
  Synthetic
ccgttttttttttttgggcaaat

SEQ ID NO: 19812 - DNA, 23 bp, Artificial Sequence
  Synthetic
ccgttttttttttttgggcaaat

SEQ ID NO: 19813 - DNA, 23 bp, Artificial Sequence
  Synthetic
ccgttttttttttttgggcaatt

SEQ ID NO: 19814 - DNA, 23 bp, Artificial Sequence
  Synthetic
ccgttttttttttttgggcaatt

SEQ ID NO: 19815 - DNA, 23 bp, Artificial Sequence
  Synthetic
ccgttttttttttttgggaaact

SEQ ID NO: 19816 - DNA, 23 bp, Artificial Sequence
  Synthetic
ccgttttttttttttggcaactc

SEQ ID NO: 19817 - DNA, 23 bp, Artificial Sequence
  Synthetic
ccgttttttttttttggacaaat

SEQ ID NO: 19818 - DNA, 23 bp, Artificial Sequence
  Synthetic
ccgttttttttttttagcaaatc

SEQ ID NO: 19819 - DNA, 23 bp, Artificial Sequence
  Synthetic
ccgttttttttttttgggcaact

SEQ ID NO: 19820 - DNA, 23 bp, Artificial Sequence
  Synthetic
ccgttttttttttttagtttgtg

SEQ ID NO: 19821 - DNA, 23 bp, Artificial Sequence
  Synthetic
ccgttttttttttttagtttgtg

SEQ ID NO: 19822 - DNA, 23 bp, Artificial Sequence
  Synthetic
ccgttttttttttttagtttgtg

SEQ ID NO: 19823 - DNA, 23 bp, Artificial Sequence
  Synthetic
ccgttttttttttttcagggaag

SEQ ID NO: 19824 - DNA, 23 bp, Artificial Sequence
  Synthetic
ccgttttttttttttgatgggtg

SEQ ID NO: 19825 - DNA, 23 bp, Artificial Sequence
  Synthetic
ccgttttttttttttgatgggtg

SEQ ID NO: 19826 - DNA, 23 bp, Artificial Sequence
  Synthetic
ccgttttttttttttaagccttg

SEQ ID NO: 19827 - DNA, 23 bp, Artificial Sequence
  Synthetic
ccgttttttttttttaagccctg

SEQ ID NO: 19828 - DNA, 23 bp, Artificial Sequence
  Synthetic
ccgttttttttttttcagccaaa

SEQ ID NO: 19829 - DNA, 23 bp, Artificial Sequence
  Synthetic
ccgttttttttttttcagccaaa

SEQ ID NO: 19830 - DNA, 23 bp, Artificial Sequence
  Synthetic
ccgttttttttttttcagccaaa

SEQ ID NO: 19831 - DNA, 23 bp, Artificial Sequence
  Synthetic
ccgttttttttttttatcaatgg

SEQ ID NO: 19832 - DNA, 23 bp, Artificial Sequence
  Synthetic
ccgttttttttttttatcaatgg

SEQ ID NO: 19833 - DNA, 23 bp, Artificial Sequence
  Synthetic
ccgttttttttttttatcaatgg

SEQ ID NO: 19834 - DNA, 23 bp, Artificial Sequence
  Synthetic
ccgttttttttttttatcaatgg

SEQ ID NO: 19835 - DNA, 23 bp, Artificial Sequence
  Synthetic
ccgttttttttttttcaaagaag

SEQ ID NO: 19836 - DNA, 23 bp, Artificial Sequence
  Synthetic
ccgttttttttttttaaagaaga

SEQ ID NO: 19837 - DNA, 23 bp, Artificial Sequence
  Synthetic
ccgttttttttttttaaagaaga

SEQ ID NO: 19838 - DNA, 23 bp, Artificial Sequence
  Synthetic
ccgttttttttttttaagcctct

SEQ ID NO: 19839 - DNA, 23 bp, Artificial Sequence
  Synthetic
ccgttttttttttttaagcctct

SEQ ID NO: 19840 - DNA, 23 bp, Artificial Sequence
  Synthetic
ccgttttttttttttctaaaaat

SEQ ID NO: 19841 - DNA, 23 bp, Artificial Sequence
  Synthetic
ccgttttttttttttctaaaaat

SEQ ID NO: 19842 - DNA, 23 bp, Artificial Sequence
  Synthetic
ccgttttttttttttctaaaaat

SEQ ID NO: 19843 - DNA, 23 bp, Artificial Sequence
  Synthetic
ccgttttttttttttaaaaatag

SEQ ID NO: 19844 - DNA, 23 bp, Artificial Sequence
  Synthetic
ccgttttttttttttctaaaaat

SEQ ID NO: 19845 - DNA, 23 bp, Artificial Sequence
  Synthetic
ccgttttttttttttctaaaaat

SEQ ID NO: 19846 - DNA, 23 bp, Artificial Sequence
  Synthetic
ccgttttttttttttctaaaaat

SEQ ID NO: 19847 - DNA, 23 bp, Artificial Sequence
  Synthetic
ccgttttttttttttctaaaaat

SEQ ID NO: 19848 - DNA, 23 bp, Artificial Sequence
  Synthetic
ccgttttttttttttctaaaaat

SEQ ID NO: 19849 - DNA, 23 bp, Artificial Sequence
  Synthetic
ccgttttttttttttctaaaaat

SEQ ID NO: 19850 - DNA, 23 bp, Artificial Sequence
  Synthetic
ccgttttttttttttctaaaaat

SEQ ID NO: 19851 - DNA, 23 bp, Artificial Sequence
  Synthetic
ccgttttttttttttctaaaaat

SEQ ID NO: 19852 - DNA, 23 bp, Artificial Sequence
  Synthetic
ccgttttttttttttctaaaaat

SEQ ID NO: 19853 - DNA, 23 bp, Artificial Sequence
  Synthetic
ccgttttttttttttctaaaaat

SEQ ID NO: 19854 - DNA, 23 bp, Artificial Sequence
  Synthetic
ccgttttttttttttctaaaaat

SEQ ID NO: 19855 - DNA, 23 bp, Artificial Sequence
  Synthetic
ccgttttttttttttctaaaaat

SEQ ID NO: 19856 - DNA, 23 bp, Artificial Sequence
  Synthetic
ccgttttttttttttctaaaaat

SEQ ID NO: 19857 - DNA, 23 bp, Artificial Sequence
  Synthetic
ccgttttttttttttctaaaaat

SEQ ID NO: 19858 - DNA, 23 bp, Artificial Sequence
  Synthetic
ccgttttttttttttctaaaaat

SEQ ID NO: 19859 - DNA, 23 bp, Artificial Sequence
  Synthetic
ccgttttttttttttgagccgga

SEQ ID NO: 19860 - DNA, 23 bp, Artificial Sequence
  Synthetic
ccgttttttttttttaacgtcaa

SEQ ID NO: 19861 - DNA, 23 bp, Artificial Sequence
  Synthetic
ccgttttttttttttaacatcaa

SEQ ID NO: 19862 - DNA, 23 bp, Artificial Sequence
  Synthetic
ccgttttttttttttaagctgtt

SEQ ID NO: 19863 - DNA, 23 bp, Artificial Sequence
  Synthetic
ccgttttttttttttaagctgtt

SEQ ID NO: 19864 - DNA, 23 bp, Artificial Sequence
  Synthetic
ccgttttttttttttaagctgtt

SEQ ID NO: 19865 - DNA, 23 bp, Artificial Sequence
  Synthetic
ccgttttttttttttaagctgtt

SEQ ID NO: 19866 - DNA, 23 bp, Artificial Sequence
  Synthetic
ccgttttttttttttaagctgtt

SEQ ID NO: 19867 - DNA, 23 bp, Artificial Sequence
  Synthetic
ccgttttttttttttaatgggag

SEQ ID NO: 19868 - DNA, 23 bp, Artificial Sequence
  Synthetic
ccgttttttttttttcaagttcg

SEQ ID NO: 19869 - DNA, 23 bp, Artificial Sequence
  Synthetic
ccgttttttttttttagttatca

SEQ ID NO: 19870 - DNA, 23 bp, Artificial Sequence
  Synthetic
ccgttttttttttttagccctgt

SEQ ID NO: 19871 - DNA, 23 bp, Artificial Sequence
  Synthetic
ccgttttttttttttaggagtct

SEQ ID NO: 19872 - DNA, 23 bp, Artificial Sequence
  Synthetic
ccgttttttttttttacctgcac

SEQ ID NO: 19873 - DNA, 23 bp, Artificial Sequence
  Synthetic
ccgttttttttttttgcactgtc

SEQ ID NO: 19874 - DNA, 23 bp, Artificial Sequence
  Synthetic
ccgttttttttttttagccctgt

SEQ ID NO: 19875 - DNA, 23 bp, Artificial Sequence
  Synthetic
ccgttttttttttttcattcacc

SEQ ID NO: 19876 - DNA, 23 bp, Artificial Sequence
  Synthetic
ccgttttttttttttcaagttag

SEQ ID NO: 19877 - DNA, 23 bp, Artificial Sequence
  Synthetic
ccgttttttttttttccaagctc

SEQ ID NO: 19878 - DNA, 23 bp, Artificial Sequence
  Synthetic
ccgttttttttttttaagagacc

SEQ ID NO: 19879 - DNA, 23 bp, Artificial Sequence
  Synthetic
ccgttttttttttttgctggttg

SEQ ID NO: 19880 - DNA, 23 bp, Artificial Sequence
  Synthetic
ccgttttttttttttcataggaa

SEQ ID NO: 19881 - DNA, 23 bp, Artificial Sequence
  Synthetic
ccgttttttttttttatcatcaa

SEQ ID NO: 19882 - DNA, 23 bp, Artificial Sequence
  Synthetic
ccgttttttttttttccataggg

SEQ ID NO: 19883 - DNA, 23 bp, Artificial Sequence
  Synthetic
ccgttttttttttttgctacagt

SEQ ID NO: 19884 - DNA, 23 bp, Artificial Sequence
  Synthetic
ccgttttttttttttgtacatca

SEQ ID NO: 19885 - DNA, 23 bp, Artificial Sequence
  Synthetic
ccgttttttttttttgggattcc

SEQ ID NO: 19886 - DNA, 23 bp, Artificial Sequence
  Synthetic
ccgttttttttttttagaagcat

SEQ ID NO: 19887 - DNA, 23 bp, Artificial Sequence
  Synthetic
ccgttttttttttttaaggcaac

SEQ ID NO: 19888 - DNA, 23 bp, Artificial Sequence
  Synthetic
ccgttttttttttttcaaaccat

SEQ ID NO: 19889 - DNA, 23 bp, Artificial Sequence
  Synthetic
ccgttttttttttttaaccatga

SEQ ID NO: 19890 - DNA, 23 bp, Artificial Sequence
  Synthetic
ccgttttttttttttccaatatt

SEQ ID NO: 19891 - DNA, 23 bp, Artificial Sequence
  Synthetic
ccgttttttttttttaagtgcct

SEQ ID NO: 19892 - DNA, 23 bp, Artificial Sequence
  Synthetic
ccgttttttttttttacctgcac

SEQ ID NO: 19893 - DNA, 23 bp, Artificial Sequence
  Synthetic
ccgttttttttttttgcactaga

SEQ ID NO: 19894 - DNA, 23 bp, Artificial Sequence
  Synthetic
ccgttttttttttttcaccgaca

SEQ ID NO: 19895 - DNA, 23 bp, Artificial Sequence
  Synthetic
ccgttttttttttttacaatcaa

SEQ ID NO: 19896 - DNA, 23 bp, Artificial Sequence
  Synthetic
ccgttttttttttttcccaccga

SEQ ID NO: 19897 - DNA, 23 bp, Artificial Sequence
  Synthetic
ccgttttttttttttcaccgaca

SEQ ID NO: 19898 - DNA, 23 bp, Artificial Sequence
  Synthetic
ccgttttttttttttgtgaattc

SEQ ID NO: 19899 - DNA, 23 bp, Artificial Sequence
  Synthetic
ccgttttttttttttccttatca

SEQ ID NO: 19900 - DNA, 23 bp, Artificial Sequence
  Synthetic
ccgttttttttttttgcccaaaa

SEQ ID NO: 19901 - DNA, 23 bp, Artificial Sequence
  Synthetic
ccgttttttttttttcctccacc

SEQ ID NO: 19902 - DNA, 23 bp, Artificial Sequence
  Synthetic
ccgttttttttttttctaatata

SEQ ID NO: 19903 - DNA, 23 bp, Artificial Sequence
  Synthetic
ccgttttttttttttacatggag

SEQ ID NO: 19904 - DNA, 23 bp, Artificial Sequence
  Synthetic
ccgttttttttttttcaacaaca

SEQ ID NO: 19905 - DNA, 23 bp, Artificial Sequence
  Synthetic
ccgttttttttttttgggtggag

SEQ ID NO: 19906 - DNA, 23 bp, Artificial Sequence
  Synthetic
ccgttttttttttttatctcccc

SEQ ID NO: 19907 - DNA, 23 bp, Artificial Sequence
  Synthetic
ccgttttttttttttacaggtag

SEQ ID NO: 19908 - DNA, 23 bp, Artificial Sequence
  Synthetic
ccgttttttttttttgttttgca

SEQ ID NO: 19909 - DNA, 23 bp, Artificial Sequence
  Synthetic
ccgttttttttttttgttttgca

SEQ ID NO: 19910 - DNA, 23 bp, Artificial Sequence
  Synthetic
ccgttttttttttttctgcacta

SEQ ID NO: 19911 - DNA, 23 bp, Artificial Sequence
  Synthetic
ccgttttttttttttgcatagga

SEQ ID NO: 19912 - DNA, 23 bp, Artificial Sequence
  Synthetic
ccgttttttttttttgactccgg

SEQ ID NO: 19913 - DNA, 23 bp, Artificial Sequence
  Synthetic
ccgttttttttttttacatcagt

SEQ ID NO: 19914 - DNA, 23 bp, Artificial Sequence
  Synthetic
ccgttttttttttttcctgtctg

SEQ ID NO: 19915 - DNA, 23 bp, Artificial Sequence
  Synthetic
ccgttttttttttttgtcaattc

SEQ ID NO: 19916 - DNA, 23 bp, Artificial Sequence
  Synthetic
ccgttttttttttttcagttgcc

SEQ ID NO: 19917 - DNA, 23 bp, Artificial Sequence
  Synthetic
ccgttttttttttttatggttag

SEQ ID NO: 19918 - DNA, 23 bp, Artificial Sequence
  Synthetic
ccgttttttttttttagttcttc

SEQ ID NO: 19919 - DNA, 23 bp, Artificial Sequence
  Synthetic
ccgttttttttttttagtgtcag

SEQ ID NO: 19920 - DNA, 23 bp, Artificial Sequence
  Synthetic
ccgttttttttttttggtatttg

SEQ ID NO: 19921 - DNA, 23 bp, Artificial Sequence
  Synthetic
ccgttttttttttttacggaacc

SEQ ID NO: 19922 - DNA, 23 bp, Artificial Sequence
  Synthetic
ccgttttttttttttaaatccct

SEQ ID NO: 19923 - DNA, 23 bp, Artificial Sequence
  Synthetic
ccgttttttttttttgtaatccc

SEQ ID NO: 19924 - DNA, 23 bp, Artificial Sequence
  Synthetic
ccgttttttttttttcctgctga

SEQ ID NO: 19925 - DNA, 23 bp, Artificial Sequence
  Synthetic
ccgttttttttttttgaccgaga

SEQ ID NO: 19926 - DNA, 23 bp, Artificial Sequence
  Synthetic
ccgttttttttttttcctatcct

SEQ ID NO: 19927 - DNA, 23 bp, Artificial Sequence
  Synthetic
ccgttttttttttttcggaactt

SEQ ID NO: 19928 - DNA, 23 bp, Artificial Sequence
  Synthetic
ccgttttttttttttaatagact

SEQ ID NO: 19929 - DNA, 23 bp, Artificial Sequence
  Synthetic
ccgttttttttttttccgatttc

SEQ ID NO: 19930 - DNA, 23 bp, Artificial Sequence
  Synthetic
ccgttttttttttttgatttcaa

SEQ ID NO: 19931 - DNA, 23 bp, Artificial Sequence
  Synthetic
ccgttttttttttttgcaaacat

SEQ ID NO: 19932 - DNA, 23 bp, Artificial Sequence
  Synthetic
ccgttttttttttttcagtcgag

SEQ ID NO: 19933 - DNA, 23 bp, Artificial Sequence
  Synthetic
ccgttttttttttttgagtgtag

SEQ ID NO: 19934 - DNA, 23 bp, Artificial Sequence
  Synthetic
ccgttttttttttttgagagtgt

SEQ ID NO: 19935 - DNA, 23 bp, Artificial Sequence
  Synthetic
ccgttttttttttttcagtcggg

SEQ ID NO: 19936 - DNA, 23 bp, Artificial Sequence
  Synthetic
ccgttttttttttttgctatgcc

SEQ ID NO: 19937 - DNA, 23 bp, Artificial Sequence
  Synthetic
ccgttttttttttttaacttagt

SEQ ID NO: 19938 - DNA, 23 bp, Artificial Sequence
  Synthetic
ccgttttttttttttatgcaact

SEQ ID NO: 19939 - DNA, 23 bp, Artificial Sequence
  Synthetic
ccgttttttttttttaaccagct

SEQ ID NO: 19940 - DNA, 23 bp, Artificial Sequence
  Synthetic
ccgttttttttttttcaaaatca

SEQ ID NO: 19941 - DNA, 23 bp, Artificial Sequence
  Synthetic
ccgttttttttttttacagctag

SEQ ID NO: 19942 - DNA, 23 bp, Artificial Sequence
  Synthetic
ccgttttttttttttaggccggg

SEQ ID NO: 19943 - DNA, 23 bp, Artificial Sequence
  Synthetic
ccgttttttttttttcctgcacg

SEQ ID NO: 19944 - DNA, 23 bp, Artificial Sequence
  Synthetic
ccgttttttttttttcaataaat

SEQ ID NO: 19945 - DNA, 23 bp, Artificial Sequence
  Synthetic
ccgttttttttttttaaaaatgt

SEQ ID NO: 19946 - DNA, 23 bp, Artificial Sequence
  Synthetic
ccgttttttttttttcaatacaa

SEQ ID NO: 19947 - DNA, 23 bp, Artificial Sequence
  Synthetic
ccgttttttttttttcaagatcg

SEQ ID NO: 19948 - DNA, 23 bp, Artificial Sequence
  Synthetic
ccgttttttttttttccccgggg

SEQ ID NO: 19949 - DNA, 23 bp, Artificial Sequence
  Synthetic
ccgttttttttttttcaggtcac

SEQ ID NO: 19950 - DNA, 23 bp, Artificial Sequence
  Synthetic
ccgttttttttttttccgtatcc

SEQ ID NO: 19951 - DNA, 23 bp, Artificial Sequence
  Synthetic
ccgttttttttttttgccagtcc

SEQ ID NO: 19952 - DNA, 23 bp, Artificial Sequence
  Synthetic
ccgttttttttttttcactgtgc

SEQ ID NO: 19953 - DNA, 23 bp, Artificial Sequence
  Synthetic
ccgttttttttttttctggacac

SEQ ID NO: 19954 - DNA, 23 bp, Artificial Sequence
  Synthetic
ccgttttttttttttgttcagcc

SEQ ID NO: 19955 - DNA, 23 bp, Artificial Sequence
  Synthetic
ccgttttttttttttaagcgcac

SEQ ID NO: 19956 - DNA, 23 bp, Artificial Sequence
  Synthetic
ccgttttttttttttaccacacc

SEQ ID NO: 19957 - DNA, 23 bp, Artificial Sequence
  Synthetic
ccgttttttttttttaacaggcc

SEQ ID NO: 19958 - DNA, 23 bp, Artificial Sequence
  Synthetic
ccgttttttttttttaatgaaga

SEQ ID NO: 19959 - DNA, 23 bp, Artificial Sequence
  Synthetic
ccgttttttttttttaaattccc

SEQ ID NO: 19960 - DNA, 23 bp, Artificial Sequence
  Synthetic
ccgttttttttttttcagtagag

SEQ ID NO: 19961 - DNA, 23 bp, Artificial Sequence
  Synthetic
ccgttttttttttttacctagtg

SEQ ID NO: 19962 - DNA, 23 bp, Artificial Sequence
  Synthetic
ccgttttttttttttcaccgcac

SEQ ID NO: 19963 - DNA, 23 bp, Artificial Sequence
  Synthetic
ccgttttttttttttacctagtg

SEQ ID NO: 19964 - DNA, 23 bp, Artificial Sequence
  Synthetic
ccgttttttttttttcacatcac

SEQ ID NO: 19965 - DNA, 23 bp, Artificial Sequence
  Synthetic
ccgttttttttttttcatagtgg

SEQ ID NO: 19966 - DNA, 23 bp, Artificial Sequence
  Synthetic
ccgttttttttttttcagcacgt

SEQ ID NO: 19967 - DNA, 23 bp, Artificial Sequence
  Synthetic
ccgttttttttttttgtaagccg

SEQ ID NO: 19968 - DNA, 23 bp, Artificial Sequence
  Synthetic
ccgttttttttttttatgggcag

SEQ ID NO: 19969 - DNA, 23 bp, Artificial Sequence
  Synthetic
ccgttttttttttttaagggggg

SEQ ID NO: 19970 - DNA, 23 bp, Artificial Sequence
  Synthetic
ccgttttttttttttctatacaa

SEQ ID NO: 19971 - DNA, 23 bp, Artificial Sequence
  Synthetic
ccgttttttttttttccacacaa

SEQ ID NO: 19972 - DNA, 23 bp, Artificial Sequence
  Synthetic
ccgttttttttttttccatacaa

SEQ ID NO: 19973 - DNA, 23 bp, Artificial Sequence
  Synthetic
ccgttttttttttttatgcaacc

SEQ ID NO: 19974 - DNA, 23 bp, Artificial Sequence
  Synthetic
ccgttttttttttttaaaggcag

SEQ ID NO: 19975 - DNA, 23 bp, Artificial Sequence
  Synthetic
ccgttttttttttttatacaacc

SEQ ID NO: 19976 - DNA, 23 bp, Artificial Sequence
  Synthetic
ccgttttttttttttctatacaa

SEQ ID NO: 19977 - DNA, 23 bp, Artificial Sequence
  Synthetic
ccgttttttttttttagcacaaa

SEQ ID NO: 19978 - DNA, 23 bp, Artificial Sequence
  Synthetic
ccgttttttttttttacacttct

SEQ ID NO: 19979 - DNA, 23 bp, Artificial Sequence
  Synthetic
ccgttttttttttttgtacataa

SEQ ID NO: 19980 - DNA, 23 bp, Artificial Sequence
  Synthetic
ccgttttttttttttcaagttcg

SEQ ID NO: 19981 - DNA, 23 bp, Artificial Sequence
  Synthetic
ccgttttttttttttagttatca

SEQ ID NO: 19982 - DNA, 23 bp, Artificial Sequence
  Synthetic
ccgttttttttttttagctatca

SEQ ID NO: 19983 - DNA, 23 bp, Artificial Sequence
  Synthetic
ccgttttttttttttagccctgt

SEQ ID NO: 19984 - DNA, 23 bp, Artificial Sequence
  Synthetic
ccgttttttttttttgcactgtc

SEQ ID NO: 19985 - DNA, 23 bp, Artificial Sequence
  Synthetic
ccgttttttttttttagccctgt

SEQ ID NO: 19986 - DNA, 23 bp, Artificial Sequence
  Synthetic
ccgttttttttttttcaaattcg

SEQ ID NO: 19987 - DNA, 23 bp, Artificial Sequence
  Synthetic
ccgttttttttttttacaaattc

SEQ ID NO: 19988 - DNA, 23 bp, Artificial Sequence
  Synthetic
ccgttttttttttttaaacacca

SEQ ID NO: 19989 - DNA, 23 bp, Artificial Sequence
  Synthetic
ccgttttttttttttcattcacc

SEQ ID NO: 19990 - DNA, 23 bp, Artificial Sequence
  Synthetic
ccgttttttttttttcaggttaa

SEQ ID NO: 19991 - DNA, 23 bp, Artificial Sequence
  Synthetic
ccgttttttttttttcaagttag

SEQ ID NO: 19992 - DNA, 23 bp, Artificial Sequence
  Synthetic
ccgttttttttttttattattac

SEQ ID NO: 19993 - DNA, 23 bp, Artificial Sequence
  Synthetic
ccgttttttttttttcgtaccaa

SEQ ID NO: 19994 - DNA, 23 bp, Artificial Sequence
  Synthetic
ccgttttttttttttccaagctc

SEQ ID NO: 19995 - DNA, 23 bp, Artificial Sequence
  Synthetic
ccgttttttttttttaagagacc

SEQ ID NO: 19996 - DNA, 23 bp, Artificial Sequence
  Synthetic
ccgttttttttttttaagagacc

SEQ ID NO: 19997 - DNA, 23 bp, Artificial Sequence
  Synthetic
ccgttttttttttttcaagccca

SEQ ID NO: 19998 - DNA, 23 bp, Artificial Sequence
  Synthetic
ccgttttttttttttctttttgg

SEQ ID NO: 19999 - DNA, 23 bp, Artificial Sequence
  Synthetic
ccgttttttttttttccctttta

SEQ ID NO: 20000 - DNA, 23 bp, Artificial Sequence
  Synthetic
ccgttttttttttttccctttca

SEQ ID NO: 20001 - DNA, 23 bp, Artificial Sequence
  Synthetic
ccgttttttttttttaccatggc

SEQ ID NO: 20002 - DNA, 23 bp, Artificial Sequence
  Synthetic
ccgttttttttttttagctggtt

SEQ ID NO: 20003 - DNA, 23 bp, Artificial Sequence
  Synthetic
ccgttttttttttttctggttga

SEQ ID NO: 20004 - DNA, 23 bp, Artificial Sequence
  Synthetic
ccgttttttttttttctctggtc

SEQ ID NO: 20005 - DNA, 23 bp, Artificial Sequence
  Synthetic
ccgttttttttttttcataggaa

SEQ ID NO: 20006 - DNA, 23 bp, Artificial Sequence
  Synthetic
ccgttttttttttttcataggaa

SEQ ID NO: 20007 - DNA, 23 bp, Artificial Sequence
  Synthetic
ccgttttttttttttatcatcaa

SEQ ID NO: 20008 - DNA, 23 bp, Artificial Sequence
  Synthetic
ccgttttttttttttcgcgtatt

SEQ ID NO: 20009 - DNA, 23 bp, Artificial Sequence
  Synthetic
ccgttttttttttttcacaacac

SEQ ID NO: 20010 - DNA, 23 bp, Artificial Sequence
  Synthetic
ccgttttttttttttacacgtgc

SEQ ID NO: 20011 - DNA, 23 bp, Artificial Sequence
  Synthetic
ccgttttttttttttccataggg

SEQ ID NO: 20012 - DNA, 23 bp, Artificial Sequence
  Synthetic
ccgttttttttttttcgtggttc

SEQ ID NO: 20013 - DNA, 23 bp, Artificial Sequence
  Synthetic
ccgttttttttttttatctttac

SEQ ID NO: 20014 - DNA, 23 bp, Artificial Sequence
  Synthetic
ccgttttttttttttataaagta

SEQ ID NO: 20015 - DNA, 23 bp, Artificial Sequence
  Synthetic
ccgttttttttttttgtgctttc

SEQ ID NO: 20016 - DNA, 23 bp, Artificial Sequence
  Synthetic
ccgttttttttttttgctacagt

SEQ ID NO: 20017 - DNA, 23 bp, Artificial Sequence
  Synthetic
ccgttttttttttttgtacatca

SEQ ID NO: 20018 - DNA, 23 bp, Artificial Sequence
  Synthetic
ccgttttttttttttgggattcc

SEQ ID NO: 20019 - DNA, 23 bp, Artificial Sequence
  Synthetic
ccgttttttttttttcccatgga

SEQ ID NO: 20020 - DNA, 23 bp, Artificial Sequence
  Synthetic
ccgttttttttttttaaagttct

SEQ ID NO: 20021 - DNA, 23 bp, Artificial Sequence
  Synthetic
ccgttttttttttttctggtaca

SEQ ID NO: 20022 - DNA, 23 bp, Artificial Sequence
  Synthetic
ccgttttttttttttcaaggagc

SEQ ID NO: 20023 - DNA, 23 bp, Artificial Sequence
  Synthetic
ccgttttttttttttagactgtg

SEQ ID NO: 20024 - DNA, 23 bp, Artificial Sequence
  Synthetic
ccgttttttttttttcaagttct

SEQ ID NO: 20025 - DNA, 23 bp, Artificial Sequence
  Synthetic
ccgttttttttttttcttttgtg

SEQ ID NO: 20026 - DNA, 23 bp, Artificial Sequence
  Synthetic
ccgttttttttttttaaggcaac

SEQ ID NO: 20027 - DNA, 23 bp, Artificial Sequence
  Synthetic
ccgttttttttttttaaccatga

SEQ ID NO: 20028 - DNA, 23 bp, Artificial Sequence
  Synthetic
ccgttttttttttttccaatatt

SEQ ID NO: 20029 - DNA, 23 bp, Artificial Sequence
  Synthetic
ccgttttttttttttacctgcac

SEQ ID NO: 20030 - DNA, 23 bp, Artificial Sequence
  Synthetic
ccgttttttttttttgcactaga

SEQ ID NO: 20031 - DNA, 23 bp, Artificial Sequence
  Synthetic
ccgttttttttttttcaccgaca

SEQ ID NO: 20032 - DNA, 23 bp, Artificial Sequence
  Synthetic
ccgttttttttttttacaatcaa

SEQ ID NO: 20033 - DNA, 23 bp, Artificial Sequence
  Synthetic
ccgttttttttttttcaccgaca

SEQ ID NO: 20034 - DNA, 23 bp, Artificial Sequence
  Synthetic
ccgttttttttttttcaccgaca

SEQ ID NO: 20035 - DNA, 23 bp, Artificial Sequence
  Synthetic
ccgttttttttttttgtgaattc

SEQ ID NO: 20036 - DNA, 23 bp, Artificial Sequence
  Synthetic
ccgttttttttttttccttatca

SEQ ID NO: 20037 - DNA, 23 bp, Artificial Sequence
  Synthetic
ccgttttttttttttactgcctt

SEQ ID NO: 20038 - DNA, 23 bp, Artificial Sequence
  Synthetic
ccgttttttttttttgcccaaaa

SEQ ID NO: 20039 - DNA, 23 bp, Artificial Sequence
  Synthetic
ccgttttttttttttgctgcaac

SEQ ID NO: 20040 - DNA, 23 bp, Artificial Sequence
  Synthetic
ccgttttttttttttgatatcag

SEQ ID NO: 20041 - DNA, 23 bp, Artificial Sequence
  Synthetic
ccgttttttttttttctaatata

SEQ ID NO: 20042 - DNA, 23 bp, Artificial Sequence
  Synthetic
ccgttttttttttttctgctttt

SEQ ID NO: 20043 - DNA, 23 bp, Artificial Sequence
  Synthetic
ccgttttttttttttctgtcaat

SEQ ID NO: 20044 - DNA, 23 bp, Artificial Sequence
  Synthetic
ccgttttttttttttggactttg

SEQ ID NO: 20045 - DNA, 23 bp, Artificial Sequence
  Synthetic
ccgttttttttttttacatggag

SEQ ID NO: 20046 - DNA, 23 bp, Artificial Sequence
  Synthetic
ccgttttttttttttcaatattt

SEQ ID NO: 20047 - DNA, 23 bp, Artificial Sequence
  Synthetic
ccgttttttttttttaacaacat

SEQ ID NO: 20048 - DNA, 23 bp, Artificial Sequence
  Synthetic
ccgttttttttttttaacaacag

SEQ ID NO: 20049 - DNA, 23 bp, Artificial Sequence
  Synthetic
ccgttttttttttttacaggtag

SEQ ID NO: 20050 - DNA, 23 bp, Artificial Sequence
  Synthetic
ccgttttttttttttgttttgca

SEQ ID NO: 20051 - DNA, 23 bp, Artificial Sequence
  Synthetic
ccgttttttttttttgttttgca

SEQ ID NO: 20052 - DNA, 23 bp, Artificial Sequence
  Synthetic
ccgttttttttttttatcgttac

SEQ ID NO: 20053 - DNA, 23 bp, Artificial Sequence
  Synthetic
ccgttttttttttttatcattac

SEQ ID NO: 20054 - DNA, 23 bp, Artificial Sequence
  Synthetic
ccgttttttttttttatcattac

SEQ ID NO: 20055 - DNA, 23 bp, Artificial Sequence
  Synthetic
ccgttttttttttttgtggtcct

SEQ ID NO: 20056 - DNA, 23 bp, Artificial Sequence
  Synthetic
ccgttttttttttttgcatagga

SEQ ID NO: 20057 - DNA, 23 bp, Artificial Sequence
  Synthetic
ccgttttttttttttgactccgg

SEQ ID NO: 20058 - DNA, 23 bp, Artificial Sequence
  Synthetic
ccgttttttttttttacacactt

SEQ ID NO: 20059 - DNA, 23 bp, Artificial Sequence
  Synthetic
ccgttttttttttttgggaggag

SEQ ID NO: 20060 - DNA, 23 bp, Artificial Sequence
  Synthetic
ccgttttttttttttaagctttt

SEQ ID NO: 20061 - DNA, 23 bp, Artificial Sequence
  Synthetic
ccgttttttttttttcctgcact

SEQ ID NO: 20062 - DNA, 23 bp, Artificial Sequence
  Synthetic
ccgttttttttttttagtgctcg

SEQ ID NO: 20063 - DNA, 23 bp, Artificial Sequence
  Synthetic
ccgttttttttttttctgcacta

SEQ ID NO: 20064 - DNA, 23 bp, Artificial Sequence
  Synthetic
ccgttttttttttttgaagtgct

SEQ ID NO: 20065 - DNA, 23 bp, Artificial Sequence
  Synthetic
ccgttttttttttttacatcagt

SEQ ID NO: 20066 - DNA, 23 bp, Artificial Sequence
  Synthetic
ccgttttttttttttgccgctgt

SEQ ID NO: 20067 - DNA, 23 bp, Artificial Sequence
  Synthetic
ccgttttttttttttgcaaagga

SEQ ID NO: 20068 - DNA, 23 bp, Artificial Sequence
  Synthetic
ccgttttttttttttccgtgact

SEQ ID NO: 20069 - DNA, 23 bp, Artificial Sequence
  Synthetic
ccgttttttttttttcctgtctg

SEQ ID NO: 20070 - DNA, 23 bp, Artificial Sequence
  Synthetic
ccgttttttttttttgtcaaatc

SEQ ID NO: 20071 - DNA, 23 bp, Artificial Sequence
  Synthetic
ccgttttttttttttcagttgcc

SEQ ID NO: 20072 - DNA, 23 bp, Artificial Sequence
  Synthetic
ccgttttttttttttcagtcagt

SEQ ID NO: 20073 - DNA, 23 bp, Artificial Sequence
  Synthetic
ccgttttttttttttatggttag

SEQ ID NO: 20074 - DNA, 23 bp, Artificial Sequence
  Synthetic
ccgttttttttttttaattgcgt

SEQ ID NO: 20075 - DNA, 23 bp, Artificial Sequence
  Synthetic
ccgttttttttttttagttcttc

SEQ ID NO: 20076 - DNA, 23 bp, Artificial Sequence
  Synthetic
ccgttttttttttttagcttgcc

SEQ ID NO: 20077 - DNA, 23 bp, Artificial Sequence
  Synthetic
ccgttttttttttttaacccagc

SEQ ID NO: 20078 - DNA, 23 bp, Artificial Sequence
  Synthetic
ccgttttttttttttgacccagt

SEQ ID NO: 20079 - DNA, 23 bp, Artificial Sequence
  Synthetic
ccgttttttttttttggtatttg

SEQ ID NO: 20080 - DNA, 23 bp, Artificial Sequence
  Synthetic
ccgttttttttttttacggaacc

SEQ ID NO: 20081 - DNA, 23 bp, Artificial Sequence
  Synthetic
ccgttttttttttttaaatccct

SEQ ID NO: 20082 - DNA, 23 bp, Artificial Sequence
  Synthetic
ccgttttttttttttaatccctg

SEQ ID NO: 20083 - DNA, 23 bp, Artificial Sequence
  Synthetic
ccgttttttttttttcctgctga

SEQ ID NO: 20084 - DNA, 23 bp, Artificial Sequence
  Synthetic
ccgttttttttttttgaccgaga

SEQ ID NO: 20085 - DNA, 23 bp, Artificial Sequence
  Synthetic
ccgttttttttttttctatcctg

SEQ ID NO: 20086 - DNA, 23 bp, Artificial Sequence
  Synthetic
ccgttttttttttttcctatcct

SEQ ID NO: 20087 - DNA, 23 bp, Artificial Sequence
  Synthetic
ccgttttttttttttggaactta

SEQ ID NO: 20088 - DNA, 23 bp, Artificial Sequence
  Synthetic
ccgttttttttttttagaactta

SEQ ID NO: 20089 - DNA, 23 bp, Artificial Sequence
  Synthetic
ccgttttttttttttaatagact

SEQ ID NO: 20090 - DNA, 23 bp, Artificial Sequence
  Synthetic
ccgttttttttttttaaagtgcc

SEQ ID NO: 20091 - DNA, 23 bp, Artificial Sequence
  Synthetic
ccgttttttttttttcacacaaa

SEQ ID NO: 20092 - DNA, 23 bp, Artificial Sequence
  Synthetic
ccgttttttttttttagagggcc

SEQ ID NO: 20093 - DNA, 23 bp, Artificial Sequence
  Synthetic
ccgttttttttttttactcaaaa

SEQ ID NO: 20094 - DNA, 23 bp, Artificial Sequence
  Synthetic
ccgttttttttttttaaagagcc

SEQ ID NO: 20095 - DNA, 23 bp, Artificial Sequence
  Synthetic
ccgttttttttttttaggattga

SEQ ID NO: 20096 - DNA, 23 bp, Artificial Sequence
  Synthetic
ccgttttttttttttgcatacat

SEQ ID NO: 20097 - DNA, 23 bp, Artificial Sequence
  Synthetic
ccgttttttttttttaagaacag

SEQ ID NO: 20098 - DNA, 23 bp, Artificial Sequence
  Synthetic
ccgttttttttttttatgtggga

SEQ ID NO: 20099 - DNA, 23 bp, Artificial Sequence
  Synthetic
ccgttttttttttttccgatttc

SEQ ID NO: 20100 - DNA, 23 bp, Artificial Sequence
  Synthetic
ccgttttttttttttcactgatt

SEQ ID NO: 20101 - DNA, 23 bp, Artificial Sequence
  Synthetic
ccgttttttttttttcgatttca

SEQ ID NO: 20102 - DNA, 23 bp, Artificial Sequence
  Synthetic
ccgttttttttttttacaccagg

SEQ ID NO: 20103 - DNA, 23 bp, Artificial Sequence
  Synthetic
ccgttttttttttttagagagct

SEQ ID NO: 20104 - DNA, 23 bp, Artificial Sequence
  Synthetic
ccgttttttttttttctttgaca

SEQ ID NO: 20105 - DNA, 23 bp, Artificial Sequence
  Synthetic
ccgttttttttttttgcaaacat

SEQ ID NO: 20106 - DNA, 23 bp, Artificial Sequence
  Synthetic
ccgttttttttttttcagtcgag

SEQ ID NO: 20107 - DNA, 23 bp, Artificial Sequence
  Synthetic
ccgttttttttttttctgagtgt

SEQ ID NO: 20108 - DNA, 23 bp, Artificial Sequence
  Synthetic
ccgttttttttttttgagagtgt

SEQ ID NO: 20109 - DNA, 23 bp, Artificial Sequence
  Synthetic
ccgttttttttttttcagtcggg

SEQ ID NO: 20110 - DNA, 23 bp, Artificial Sequence
  Synthetic
ccgttttttttttttagtcaagg

SEQ ID NO: 20111 - DNA, 23 bp, Artificial Sequence
  Synthetic
ccgttttttttttttgctatgcc

SEQ ID NO: 20112 - DNA, 23 bp, Artificial Sequence
  Synthetic
ccgttttttttttttaacttagt

SEQ ID NO: 20113 - DNA, 23 bp, Artificial Sequence
  Synthetic
ccgttttttttttttccctctca

SEQ ID NO: 20114 - DNA, 23 bp, Artificial Sequence
  Synthetic
ccgttttttttttttcagcgctt

SEQ ID NO: 20115 - DNA, 23 bp, Artificial Sequence
  Synthetic
ccgttttttttttttaggtcgac

SEQ ID NO: 20116 - DNA, 23 bp, Artificial Sequence
  Synthetic
ccgttttttttttttagcagcac

SEQ ID NO: 20117 - DNA, 23 bp, Artificial Sequence
  Synthetic
ccgttttttttttttaccaatgc

SEQ ID NO: 20118 - DNA, 23 bp, Artificial Sequence
  Synthetic
ccgttttttttttttacttactg

SEQ ID NO: 20119 - DNA, 23 bp, Artificial Sequence
  Synthetic
ccgttttttttttttggaggaag

SEQ ID NO: 20120 - DNA, 23 bp, Artificial Sequence
  Synthetic
ccgttttttttttttcctcatgc

SEQ ID NO: 20121 - DNA, 23 bp, Artificial Sequence
  Synthetic
ccgttttttttttttggaagggc

SEQ ID NO: 20122 - DNA, 23 bp, Artificial Sequence
  Synthetic
ccgttttttttttttaaaggtta

SEQ ID NO: 20123 - DNA, 23 bp, Artificial Sequence
  Synthetic
ccgttttttttttttatgcaact

SEQ ID NO: 20124 - DNA, 23 bp, Artificial Sequence
  Synthetic
ccgttttttttttttgcaggccc

SEQ ID NO: 20125 - DNA, 23 bp, Artificial Sequence
  Synthetic
ccgttttttttttttggataggc

SEQ ID NO: 20126 - DNA, 23 bp, Artificial Sequence
  Synthetic
ccgttttttttttttaagtaact

SEQ ID NO: 20127 - DNA, 23 bp, Artificial Sequence
  Synthetic
ccgttttttttttttatttttcg

SEQ ID NO: 20128 - DNA, 23 bp, Artificial Sequence
  Synthetic
ccgttttttttttttactagata

SEQ ID NO: 20129 - DNA, 23 bp, Artificial Sequence
  Synthetic
ccgttttttttttttaggcatca

SEQ ID NO: 20130 - DNA, 23 bp, Artificial Sequence
  Synthetic
ccgttttttttttttacaaaatc

SEQ ID NO: 20131 - DNA, 23 bp, Artificial Sequence
  Synthetic
ccgttttttttttttgctcctgg

SEQ ID NO: 20132 - DNA, 23 bp, Artificial Sequence
  Synthetic
ccgttttttttttttctataaag

SEQ ID NO: 20133 - DNA, 23 bp, Artificial Sequence
  Synthetic
ccgttttttttttttgaccgacc

SEQ ID NO: 20134 - DNA, 23 bp, Artificial Sequence
  Synthetic
ccgttttttttttttcgggtgcg

SEQ ID NO: 20135 - DNA, 23 bp, Artificial Sequence
  Synthetic
ccgttttttttttttggcacacg

SEQ ID NO: 20136 - DNA, 23 bp, Artificial Sequence
  Synthetic
ccgttttttttttttggtcaggc

SEQ ID NO: 20137 - DNA, 23 bp, Artificial Sequence
  Synthetic
ccgttttttttttttactggact

SEQ ID NO: 20138 - DNA, 23 bp, Artificial Sequence
  Synthetic
ccgttttttttttttaggcaggc

SEQ ID NO: 20139 - DNA, 23 bp, Artificial Sequence
  Synthetic
ccgttttttttttttgcgaccca

SEQ ID NO: 20140 - DNA, 23 bp, Artificial Sequence
  Synthetic
ccgttttttttttttaggttaag

SEQ ID NO: 20141 - DNA, 23 bp, Artificial Sequence
  Synthetic
ccgttttttttttttcaaccagc

SEQ ID NO: 20142 - DNA, 23 bp, Artificial Sequence
  Synthetic
ccgttttttttttttatcagcta

SEQ ID NO: 20143 - DNA, 23 bp, Artificial Sequence
  Synthetic
ccgttttttttttttaatcagct

SEQ ID NO: 20144 - DNA, 23 bp, Artificial Sequence
  Synthetic
ccgttttttttttttaaagtgta

SEQ ID NO: 20145 - DNA, 23 bp, Artificial Sequence
  Synthetic
ccgttttttttttttggctcaaa

SEQ ID NO: 20146 - DNA, 23 bp, Artificial Sequence
  Synthetic
ccgttttttttttttatgcaacc

SEQ ID NO: 20147 - DNA, 23 bp, Artificial Sequence
  Synthetic
ccgttttttttttttcccctgga

SEQ ID NO: 20148 - DNA, 23 bp, Artificial Sequence
  Synthetic
ccgttttttttttttagatggat

SEQ ID NO: 20149 - DNA, 23 bp, Artificial Sequence
  Synthetic
ccgttttttttttttattgcatc

SEQ ID NO: 20150 - DNA, 23 bp, Artificial Sequence
  Synthetic
ccgttttttttttttaggatttt

SEQ ID NO: 20151 - DNA, 23 bp, Artificial Sequence
  Synthetic
ccgttttttttttttgatcaacc

SEQ ID NO: 20152 - DNA, 23 bp, Artificial Sequence
  Synthetic
ccgttttttttttttaatataac

SEQ ID NO: 20153 - DNA, 23 bp, Artificial Sequence
  Synthetic
ccgttttttttttttccaggttc

SEQ ID NO: 20154 - DNA, 23 bp, Artificial Sequence
  Synthetic
ccgttttttttttttcttagcag

SEQ ID NO: 20155 - DNA, 23 bp, Artificial Sequence
  Synthetic
ccgttttttttttttggattttc

SEQ ID NO: 20156 - DNA, 23 bp, Artificial Sequence
  Synthetic
ccgttttttttttttatagaagg

SEQ ID NO: 20157 - DNA, 23 bp, Artificial Sequence
  Synthetic
ccgttttttttttttggatgttc

SEQ ID NO: 20158 - DNA, 23 bp, Artificial Sequence
  Synthetic
ccgttttttttttttccatagaa

SEQ ID NO: 20159 - DNA, 23 bp, Artificial Sequence
  Synthetic
ccgttttttttttttgaaatttc

SEQ ID NO: 20160 - DNA, 23 bp, Artificial Sequence
  Synthetic
ccgttttttttttttaaaagttg

SEQ ID NO: 20161 - DNA, 23 bp, Artificial Sequence
  Synthetic
ccgttttttttttttacaggacc

SEQ ID NO: 20162 - DNA, 23 bp, Artificial Sequence
  Synthetic
ccgttttttttttttgttccata

SEQ ID NO: 20163 - DNA, 23 bp, Artificial Sequence
  Synthetic
ccgttttttttttttgagcttgc

SEQ ID NO: 20164 - DNA, 23 bp, Artificial Sequence
  Synthetic
ccgttttttttttttatccacca

SEQ ID NO: 20165 - DNA, 23 bp, Artificial Sequence
  Synthetic
ccgttttttttttttgtgttgtc

SEQ ID NO: 20166 - DNA, 23 bp, Artificial Sequence
  Synthetic
ccgttttttttttttccacagtc

SEQ ID NO: 20167 - DNA, 23 bp, Artificial Sequence
  Synthetic
ccgttttttttttttggttcacc

SEQ ID NO: 20168 - DNA, 23 bp, Artificial Sequence
  Synthetic
ccgttttttttttttaagttgct

SEQ ID NO: 20169 - DNA, 23 bp, Artificial Sequence
  Synthetic
ccgttttttttttttggctagtg

SEQ ID NO: 20170 - DNA, 23 bp, Artificial Sequence
  Synthetic
ccgttttttttttttacaaacat

SEQ ID NO: 20171 - DNA, 23 bp, Artificial Sequence
  Synthetic
ccgttttttttttttcttctgac

SEQ ID NO: 20172 - DNA, 23 bp, Artificial Sequence
  Synthetic
ccgttttttttttttaaaacatg

SEQ ID NO: 20173 - DNA, 23 bp, Artificial Sequence
  Synthetic
ccgttttttttttttggcattac

SEQ ID NO: 20174 - DNA, 23 bp, Artificial Sequence
  Synthetic
ccgttttttttttttatgacggc

SEQ ID NO: 20175 - DNA, 23 bp, Artificial Sequence
  Synthetic
ccgttttttttttttaccgagga

SEQ ID NO: 20176 - DNA, 23 bp, Artificial Sequence
  Synthetic
ccgttttttttttttggacatcc

SEQ ID NO: 20177 - DNA, 23 bp, Artificial Sequence
  Synthetic
ccgttttttttttttcagctaac

SEQ ID NO: 20178 - DNA, 23 bp, Artificial Sequence
  Synthetic
ccgttttttttttttaggaacac

SEQ ID NO: 20179 - DNA, 23 bp, Artificial Sequence
  Synthetic
ccgttttttttttttctcagtaa

SEQ ID NO: 20180 - DNA, 23 bp, Artificial Sequence
  Synthetic
ccgttttttttttttaagacggg

SEQ ID NO: 20181 - DNA, 23 bp, Artificial Sequence
  Synthetic
ccgttttttttttttattcatca

SEQ ID NO: 20182 - DNA, 23 bp, Artificial Sequence
  Synthetic
ccgttttttttttttggatgacc

SEQ ID NO: 20183 - DNA, 23 bp, Artificial Sequence
  Synthetic
ccgttttttttttttgccatata

SEQ ID NO: 20184 - DNA, 23 bp, Artificial Sequence
  Synthetic
ccgttttttttttttgcacacag

SEQ ID NO: 20185 - DNA, 23 bp, Artificial Sequence
  Synthetic
ccgttttttttttttgtttcccg

SEQ ID NO: 20186 - DNA, 23 bp, Artificial Sequence
  Synthetic
ccgttttttttttttaaaccaca

SEQ ID NO: 20187 - DNA, 23 bp, Artificial Sequence
  Synthetic
ccgttttttttttttacatcact

SEQ ID NO: 20188 - DNA, 23 bp, Artificial Sequence
  Synthetic
ccgttttttttttttcccaggga

SEQ ID NO: 20189 - DNA, 23 bp, Artificial Sequence
  Synthetic
ccgttttttttttttgtactgtt

SEQ ID NO: 20190 - DNA, 23 bp, Artificial Sequence
  Synthetic
ccgttttttttttttaaaccagc

SEQ ID NO: 20191 - DNA, 23 bp, Artificial Sequence
  Synthetic
ccgttttttttttttacaccaag

SEQ ID NO: 20192 - DNA, 23 bp, Artificial Sequence
  Synthetic
ccgttttttttttttaggatcga

SEQ ID NO: 20193 - DNA, 23 bp, Artificial Sequence
  Synthetic
ccgttttttttttttaccaacat

SEQ ID NO: 20194 - DNA, 23 bp, Artificial Sequence
  Synthetic
ccgttttttttttttgttatcaa

SEQ ID NO: 20195 - DNA, 23 bp, Artificial Sequence
  Synthetic
ccgttttttttttttgacatgat

SEQ ID NO: 20196 - DNA, 23 bp, Artificial Sequence
  Synthetic
ccgttttttttttttaagtgcac

SEQ ID NO: 20197 - DNA, 23 bp, Artificial Sequence
  Synthetic
ccgttttttttttttgctgggga

SEQ ID NO: 20198 - DNA, 23 bp, Artificial Sequence
  Synthetic
ccgttttttttttttcaaaatca

SEQ ID NO: 20199 - DNA, 23 bp, Artificial Sequence
  Synthetic
ccgttttttttttttgcagactg

SEQ ID NO: 20200 - DNA, 23 bp, Artificial Sequence
  Synthetic
ccgttttttttttttcaaaatca

SEQ ID NO: 20201 - DNA, 23 bp, Artificial Sequence
  Synthetic
ccgttttttttttttacagctag

SEQ ID NO: 20202 - DNA, 23 bp, Artificial Sequence
  Synthetic
ccgttttttttttttggccggga

SEQ ID NO: 20203 - DNA, 23 bp, Artificial Sequence
  Synthetic
ccgttttttttttttcctgcacg

SEQ ID NO: 20204 - DNA, 23 bp, Artificial Sequence
  Synthetic
ccgttttttttttttcaaaaatg

SEQ ID NO: 20205 - DNA, 23 bp, Artificial Sequence
  Synthetic
ccgttttttttttttcaatacaa

SEQ ID NO: 20206 - DNA, 23 bp, Artificial Sequence
  Synthetic
ccgttttttttttttcaagatcg

SEQ ID NO: 20207 - DNA, 23 bp, Artificial Sequence
  Synthetic
ccgttttttttttttcaaggtcg

SEQ ID NO: 20208 - DNA, 23 bp, Artificial Sequence
  Synthetic
ccgttttttttttttctcactct

SEQ ID NO: 20209 - DNA, 23 bp, Artificial Sequence
  Synthetic
ccgttttttttttttctcactct

SEQ ID NO: 20210 - DNA, 23 bp, Artificial Sequence
  Synthetic
ccgttttttttttttctcactct

SEQ ID NO: 20211 - DNA, 23 bp, Artificial Sequence
  Synthetic
ccgttttttttttttctctctct

SEQ ID NO: 20212 - DNA, 23 bp, Artificial Sequence
  Synthetic
ccgttttttttttttctcgctct

SEQ ID NO: 20213 - DNA, 23 bp, Artificial Sequence
  Synthetic
ccgttttttttttttgagctccc

SEQ ID NO: 20214 - DNA, 23 bp, Artificial Sequence
  Synthetic
ccgttttttttttttgagctccc

SEQ ID NO: 20215 - DNA, 23 bp, Artificial Sequence
  Synthetic
ccgttttttttttttcatacagg

SEQ ID NO: 20216 - DNA, 23 bp, Artificial Sequence
  Synthetic
ccgttttttttttttcatacagg

SEQ ID NO: 20217 - DNA, 23 bp, Artificial Sequence
  Synthetic
ccgttttttttttttcatacagg

SEQ ID NO: 20218 - DNA, 23 bp, Artificial Sequence
  Synthetic
ccgttttttttttttcatacagg

SEQ ID NO: 20219 - DNA, 23 bp, Artificial Sequence
  Synthetic
ccgttttttttttttcatacagg

SEQ ID NO: 20220 - DNA, 23 bp, Artificial Sequence
  Synthetic
ccgttttttttttttacgtgccc

SEQ ID NO: 20221 - DNA, 23 bp, Artificial Sequence
  Synthetic
ccgttttttttttttcacgtgcc

SEQ ID NO: 20222 - DNA, 23 bp, Artificial Sequence
  Synthetic
ccgttttttttttttacgtgtcc

SEQ ID NO: 20223 - DNA, 23 bp, Artificial Sequence
  Synthetic
ccgttttttttttttgaatgaag

SEQ ID NO: 20224 - DNA, 23 bp, Artificial Sequence
  Synthetic
ccgttttttttttttgaatgaag

SEQ ID NO: 20225 - DNA, 23 bp, Artificial Sequence
  Synthetic
ccgttttttttttttgaatgaag

SEQ ID NO: 20226 - DNA, 23 bp, Artificial Sequence
  Synthetic
ccgttttttttttttgaatgaag

SEQ ID NO: 20227 - DNA, 23 bp, Artificial Sequence
  Synthetic
ccgttttttttttttggattgaa

SEQ ID NO: 20228 - DNA, 23 bp, Artificial Sequence
  Synthetic
ccgttttttttttttggaatgaa

SEQ ID NO: 20229 - DNA, 23 bp, Artificial Sequence
  Synthetic
ccgttttttttttttggattgaa

SEQ ID NO: 20230 - DNA, 23 bp, Artificial Sequence
  Synthetic
ccgttttttttttttatcatgct

SEQ ID NO: 20231 - DNA, 23 bp, Artificial Sequence
  Synthetic
ccgttttttttttttatcatgct

SEQ ID NO: 20232 - DNA, 23 bp, Artificial Sequence
  Synthetic
ccgttttttttttttgatcatgc

SEQ ID NO: 20233 - DNA, 23 bp, Artificial Sequence
  Synthetic
ccgttttttttttttgatcatgc

SEQ ID NO: 20234 - DNA, 23 bp, Artificial Sequence
  Synthetic
ccgttttttttttttgatcatgc

SEQ ID NO: 20235 - DNA, 23 bp, Artificial Sequence
  Synthetic
ccgttttttttttttgatcatgc

SEQ ID NO: 20236 - DNA, 23 bp, Artificial Sequence
  Synthetic
ccgttttttttttttgatcatgc

SEQ ID NO: 20237 - DNA, 23 bp, Artificial Sequence
  Synthetic
ccgttttttttttttccgatctg

SEQ ID NO: 20238 - DNA, 23 bp, Artificial Sequence
  Synthetic
ccgttttttttttttgcaagtca

SEQ ID NO: 20239 - DNA, 23 bp, Artificial Sequence
  Synthetic
ccgttttttttttttggcaagtc

SEQ ID NO: 20240 - DNA, 23 bp, Artificial Sequence
  Synthetic
ccgttttttttttttgcaagtca

SEQ ID NO: 20241 - DNA, 23 bp, Artificial Sequence
  Synthetic
ccgttttttttttttgcaagtca

SEQ ID NO: 20242 - DNA, 23 bp, Artificial Sequence
  Synthetic
ccgttttttttttttggcaagtc

SEQ ID NO: 20243 - DNA, 23 bp, Artificial Sequence
  Synthetic
ccgttttttttttttggcaagtc

SEQ ID NO: 20244 - DNA, 23 bp, Artificial Sequence
  Synthetic
ccgttttttttttttggcaagtc

SEQ ID NO: 20245 - DNA, 23 bp, Artificial Sequence
  Synthetic
ccgttttttttttttggcaagtc

SEQ ID NO: 20246 - DNA, 23 bp, Artificial Sequence
  Synthetic
ccgttttttttttttgcaagtca

SEQ ID NO: 20247 - DNA, 23 bp, Artificial Sequence
  Synthetic
ccgttttttttttttattggcac

SEQ ID NO: 20248 - DNA, 23 bp, Artificial Sequence
  Synthetic
ccgttttttttttttattggcac

SEQ ID NO: 20249 - DNA, 23 bp, Artificial Sequence
  Synthetic
ccgttttttttttttattggctc

SEQ ID NO: 20250 - DNA, 23 bp, Artificial Sequence
  Synthetic
ccgttttttttttttattggcac

SEQ ID NO: 20251 - DNA, 23 bp, Artificial Sequence
  Synthetic
ccgttttttttttttgatattgg

SEQ ID NO: 20252 - DNA, 23 bp, Artificial Sequence
  Synthetic
ccgttttttttttttgatattgg

SEQ ID NO: 20253 - DNA, 23 bp, Artificial Sequence
  Synthetic
ccgttttttttttttagcatcat

SEQ ID NO: 20254 - DNA, 23 bp, Artificial Sequence
  Synthetic
ccgttttttttttttagcatcat

SEQ ID NO: 20255 - DNA, 23 bp, Artificial Sequence
  Synthetic
ccgttttttttttttagcatcat

SEQ ID NO: 20256 - DNA, 23 bp, Artificial Sequence
  Synthetic
ccgttttttttttttagcatcat

SEQ ID NO: 20257 - DNA, 23 bp, Artificial Sequence
  Synthetic
ccgttttttttttttcagcatca

SEQ ID NO: 20258 - DNA, 23 bp, Artificial Sequence
  Synthetic
ccgttttttttttttgagcaccc

SEQ ID NO: 20259 - DNA, 23 bp, Artificial Sequence
  Synthetic
ccgttttttttttttcaatgcga

SEQ ID NO: 20260 - DNA, 23 bp, Artificial Sequence
  Synthetic
ccgttttttttttttaggtggac

SEQ ID NO: 20261 - DNA, 23 bp, Artificial Sequence
  Synthetic
ccgttttttttttttaggtggac

SEQ ID NO: 20262 - DNA, 23 bp, Artificial Sequence
  Synthetic
ccgttttttttttttgttccccc

SEQ ID NO: 20263 - DNA, 23 bp, Artificial Sequence
  Synthetic
ccgttttttttttttgttccccc

SEQ ID NO: 20264 - DNA, 23 bp, Artificial Sequence
  Synthetic
ccgttttttttttttgttccccc

SEQ ID NO: 20265 - DNA, 23 bp, Artificial Sequence
  Synthetic
ccgttttttttttttgttccccc

SEQ ID NO: 20266 - DNA, 23 bp, Artificial Sequence
  Synthetic
ccgttttttttttttgttccccc

SEQ ID NO: 20267 - DNA, 23 bp, Artificial Sequence
  Synthetic
ccgttttttttttttgttccccc

SEQ ID NO: 20268 - DNA, 23 bp, Artificial Sequence
  Synthetic
ccgttttttttttttgttcaaga

SEQ ID NO: 20269 - DNA, 23 bp, Artificial Sequence
  Synthetic
ccgttttttttttttgttcaaga

SEQ ID NO: 20270 - DNA, 23 bp, Artificial Sequence
  Synthetic
ccgttttttttttttgttcaaga

SEQ ID NO: 20271 - DNA, 23 bp, Artificial Sequence
  Synthetic
ccgttttttttttttgggcaatt

SEQ ID NO: 20272 - DNA, 23 bp, Artificial Sequence
  Synthetic
ccgttttttttttttgggcagct

SEQ ID NO: 20273 - DNA, 23 bp, Artificial Sequence
  Synthetic
ccgttttttttttttgggcaatt

SEQ ID NO: 20274 - DNA, 23 bp, Artificial Sequence
  Synthetic
ccgttttttttttttgggcaact

SEQ ID NO: 20275 - DNA, 23 bp, Artificial Sequence
  Synthetic
ccgttttttttttttggcaaatc

SEQ ID NO: 20276 - DNA, 23 bp, Artificial Sequence
  Synthetic
ccgttttttttttttggcaaatc

SEQ ID NO: 20277 - DNA, 23 bp, Artificial Sequence
  Synthetic
ccgttttttttttttgggcaaat

SEQ ID NO: 20278 - DNA, 23 bp, Artificial Sequence
  Synthetic
ccgttttttttttttgggcaatt

SEQ ID NO: 20279 - DNA, 23 bp, Artificial Sequence
  Synthetic
ccgttttttttttttgggcaact

SEQ ID NO: 20280 - DNA, 23 bp, Artificial Sequence
  Synthetic
ccgttttttttttttcaagttcg

SEQ ID NO: 20281 - DNA, 23 bp, Artificial Sequence
  Synthetic
ccgttttttttttttagttatca

SEQ ID NO: 20282 - DNA, 23 bp, Artificial Sequence
  Synthetic
ccgttttttttttttaggagtct

SEQ ID NO: 20283 - DNA, 23 bp, Artificial Sequence
  Synthetic
ccgttttttttttttacctgcac

SEQ ID NO: 20284 - DNA, 23 bp, Artificial Sequence
  Synthetic
ccgttttttttttttgcactgtc

SEQ ID NO: 20285 - DNA, 23 bp, Artificial Sequence
  Synthetic
ccgttttttttttttcaaattcg

SEQ ID NO: 20286 - DNA, 23 bp, Artificial Sequence
  Synthetic
ccgttttttttttttcaagttag

SEQ ID NO: 20287 - DNA, 23 bp, Artificial Sequence
  Synthetic
ccgttttttttttttccaagctc

SEQ ID NO: 20288 - DNA, 23 bp, Artificial Sequence
  Synthetic
ccgttttttttttttaagagacc

SEQ ID NO: 20289 - DNA, 23 bp, Artificial Sequence
  Synthetic
ccgttttttttttttagctggtt

SEQ ID NO: 20290 - DNA, 23 bp, Artificial Sequence
  Synthetic
ccgttttttttttttagaagcat

SEQ ID NO: 20291 - DNA, 23 bp, Artificial Sequence
  Synthetic
ccgttttttttttttcaaaccat

SEQ ID NO: 20292 - DNA, 23 bp, Artificial Sequence
  Synthetic
ccgttttttttttttccaatatt

SEQ ID NO: 20293 - DNA, 23 bp, Artificial Sequence
  Synthetic
ccgttttttttttttaagtgcct

SEQ ID NO: 20294 - DNA, 23 bp, Artificial Sequence
  Synthetic
ccgttttttttttttacctgcac

SEQ ID NO: 20295 - DNA, 23 bp, Artificial Sequence
  Synthetic
ccgttttttttttttgcactaga

SEQ ID NO: 20296 - DNA, 23 bp, Artificial Sequence
  Synthetic
ccgttttttttttttcaccgaca

SEQ ID NO: 20297 - DNA, 23 bp, Artificial Sequence
  Synthetic
ccgttttttttttttgtgaattc

SEQ ID NO: 20298 - DNA, 23 bp, Artificial Sequence
  Synthetic
ccgttttttttttttagctcccc

SEQ ID NO: 20299 - DNA, 23 bp, Artificial Sequence
  Synthetic
ccgttttttttttttacaggtag

SEQ ID NO: 20300 - DNA, 23 bp, Artificial Sequence
  Synthetic
ccgttttttttttttgttttgca

SEQ ID NO: 20301 - DNA, 23 bp, Artificial Sequence
  Synthetic
ccgttttttttttttgttttgca

SEQ ID NO: 20302 - DNA, 23 bp, Artificial Sequence
  Synthetic
ccgttttttttttttctgcacta

SEQ ID NO: 20303 - DNA, 23 bp, Artificial Sequence
  Synthetic
ccgttttttttttttgcatagga

SEQ ID NO: 20304 - DNA, 23 bp, Artificial Sequence
  Synthetic
ccgttttttttttttcctgtctg

SEQ ID NO: 20305 - DNA, 23 bp, Artificial Sequence
  Synthetic
ccgttttttttttttatggttag

SEQ ID NO: 20306 - DNA, 23 bp, Artificial Sequence
  Synthetic
ccgttttttttttttagttcttc

SEQ ID NO: 20307 - DNA, 23 bp, Artificial Sequence
  Synthetic
ccgttttttttttttggtatttg

SEQ ID NO: 20308 - DNA, 23 bp, Artificial Sequence
  Synthetic
ccgttttttttttttaaatccct

SEQ ID NO: 20309 - DNA, 23 bp, Artificial Sequence
  Synthetic
ccgttttttttttttcggaactt

SEQ ID NO: 20310 - DNA, 23 bp, Artificial Sequence
  Synthetic
ccgttttttttttttaatagact

SEQ ID NO: 20311 - DNA, 23 bp, Artificial Sequence
  Synthetic
ccgttttttttttttccgatttc

SEQ ID NO: 20312 - DNA, 23 bp, Artificial Sequence
  Synthetic
ccgttttttttttttgatttcaa

SEQ ID NO: 20313 - DNA, 23 bp, Artificial Sequence
  Synthetic
ccgttttttttttttaacttagt

SEQ ID NO: 20314 - DNA, 23 bp, Artificial Sequence
  Synthetic
ccgttttttttttttaaccagct

SEQ ID NO: 20315 - DNA, 23 bp, Artificial Sequence
  Synthetic
ccgttttttttttttcaaaatca

SEQ ID NO: 20316 - DNA, 23 bp, Artificial Sequence
  Synthetic
ccgttttttttttttaggccggg

SEQ ID NO: 20317 - DNA, 23 bp, Artificial Sequence
  Synthetic
ccgttttttttttttcctgcacg

SEQ ID NO: 20318 - DNA, 23 bp, Artificial Sequence
  Synthetic
ccgttttttttttttcaataaat

SEQ ID NO: 20319 - DNA, 23 bp, Artificial Sequence
  Synthetic
ccgttttttttttttaaaaatgt

SEQ ID NO: 20320 - DNA, 23 bp, Artificial Sequence
  Synthetic
ccgttttttttttttagctttca

SEQ ID NO: 20321 - DNA, 23 bp, Artificial Sequence
  Synthetic
ccgttttttttttttagctttcg

SEQ ID NO: 20322 - DNA, 23 bp, Artificial Sequence
  Synthetic
ccgttttttttttttaagctttc

SEQ ID NO: 20323 - DNA, 23 bp, Artificial Sequence
  Synthetic
ccgttttttttttttcatccaac

SEQ ID NO: 20324 - DNA, 23 bp, Artificial Sequence
  Synthetic
ccgttttttttttttcatccaac

SEQ ID NO: 20325 - DNA, 23 bp, Artificial Sequence
  Synthetic
ccgttttttttttttgaagacag

SEQ ID NO: 20326 - DNA, 23 bp, Artificial Sequence
  Synthetic
ccgttttttttttttccttttga

SEQ ID NO: 20327 - DNA, 23 bp, Artificial Sequence
  Synthetic
ccgttttttttttttacagtcga

SEQ ID NO: 20328 - DNA, 23 bp, Artificial Sequence
  Synthetic
ccgttttttttttttaactcgga

SEQ ID NO: 20329 - DNA, 23 bp, Artificial Sequence
  Synthetic
ccgttttttttttttccttgaag

SEQ ID NO: 20330 - DNA, 23 bp, Artificial Sequence
  Synthetic
ccgttttttttttttactcctga

SEQ ID NO: 20331 - DNA, 23 bp, Artificial Sequence
  Synthetic
ccgttttttttttttgcattcac

SEQ ID NO: 20332 - DNA, 23 bp, Artificial Sequence
  Synthetic
ccgttttttttttttgcattcac

SEQ ID NO: 20333 - DNA, 23 bp, Artificial Sequence
  Synthetic
ccgttttttttttttcattcacc

SEQ ID NO: 20334 - DNA, 23 bp, Artificial Sequence
  Synthetic
ccgttttttttttttaaaggtca

SEQ ID NO: 20335 - DNA, 23 bp, Artificial Sequence
  Synthetic
ccgttttttttttttcagtcaat

SEQ ID NO: 20336 - DNA, 23 bp, Artificial Sequence
  Synthetic
ccgttttttttttttctgatacc

SEQ ID NO: 20337 - DNA, 23 bp, Artificial Sequence
  Synthetic
ccgttttttttttttgcatatta

SEQ ID NO: 20338 - DNA, 23 bp, Artificial Sequence
  Synthetic
ccgttttttttttttctttagca

SEQ ID NO: 20339 - DNA, 23 bp, Artificial Sequence
  Synthetic
ccgttttttttttttggttgatg

SEQ ID NO: 20340 - DNA, 23 bp, Artificial Sequence
  Synthetic
ccgttttttttttttagcaaacc

SEQ ID NO: 20341 - DNA, 23 bp, Artificial Sequence
  Synthetic
ccgttttttttttttccaattaa

SEQ ID NO: 20342 - DNA, 23 bp, Artificial Sequence
  Synthetic
ccgttttttttttttatatgctc

SEQ ID NO: 20343 - DNA, 23 bp, Artificial Sequence
  Synthetic
ccgttttttttttttccaataaa

SEQ ID NO: 20344 - DNA, 23 bp, Artificial Sequence
  Synthetic
ccgttttttttttttacgataca

SEQ ID NO: 20345 - DNA, 23 bp, Artificial Sequence
  Synthetic
ccgttttttttttttcatatttc

SEQ ID NO: 20346 - DNA, 23 bp, Artificial Sequence
  Synthetic
ccgttttttttttttccataatt

SEQ ID NO: 20347 - DNA, 23 bp, Artificial Sequence
  Synthetic
ccgttttttttttttcactattc

SEQ ID NO: 20348 - DNA, 23 bp, Artificial Sequence
  Synthetic
ccgttttttttttttgaactgcg

SEQ ID NO: 20349 - DNA, 23 bp, Artificial Sequence
  Synthetic
ccgttttttttttttatatccga

SEQ ID NO: 20350 - DNA, 23 bp, Artificial Sequence
  Synthetic
ccgttttttttttttgccagata

SEQ ID NO: 20351 - DNA, 23 bp, Artificial Sequence
  Synthetic
ccgttttttttttttagctgcat

SEQ ID NO: 20352 - DNA, 23 bp, Artificial Sequence
  Synthetic
ccgttttttttttttataccaga

SEQ ID NO: 20353 - DNA, 23 bp, Artificial Sequence
  Synthetic
ccgttttttttttttgccagata

SEQ ID NO: 20354 - DNA, 23 bp, Artificial Sequence
  Synthetic
ccgttttttttttttaatgttac

SEQ ID NO: 20355 - DNA, 23 bp, Artificial Sequence
  Synthetic
ccgttttttttttttagagcata

SEQ ID NO: 20356 - DNA, 23 bp, Artificial Sequence
  Synthetic
ccgttttttttttttctcatgaa

SEQ ID NO: 20357 - DNA, 23 bp, Artificial Sequence
  Synthetic
ccgttttttttttttcgttccaa

SEQ ID NO: 20358 - DNA, 23 bp, Artificial Sequence
  Synthetic
ccgttttttttttttcacaacac

SEQ ID NO: 20359 - DNA, 23 bp, Artificial Sequence
  Synthetic
ccgttttttttttttcatcaaaa

SEQ ID NO: 20360 - DNA, 23 bp, Artificial Sequence
  Synthetic
ccgttttttttttttacaaccaa

SEQ ID NO: 20361 - DNA, 23 bp, Artificial Sequence
  Synthetic
ccgttttttttttttatcatcag

SEQ ID NO: 20362 - DNA, 23 bp, Artificial Sequence
  Synthetic
ccgttttttttttttacatcaaa

SEQ ID NO: 20363 - DNA, 23 bp, Artificial Sequence
  Synthetic
ccgttttttttttttgttatgcc

SEQ ID NO: 20364 - DNA, 23 bp, Artificial Sequence
  Synthetic
ccgttttttttttttgctatgcc

SEQ ID NO: 20365 - DNA, 23 bp, Artificial Sequence
  Synthetic
ccgttttttttttttgaatgtct

SEQ ID NO: 20366 - DNA, 23 bp, Artificial Sequence
  Synthetic
ccgttttttttttttaccaagta

SEQ ID NO: 20367 - DNA, 23 bp, Artificial Sequence
  Synthetic
ccgttttttttttttagtaagtg

SEQ ID NO: 20368 - DNA, 23 bp, Artificial Sequence
  Synthetic
ccgttttttttttttcctcgttc

SEQ ID NO: 20369 - DNA, 23 bp, Artificial Sequence
  Synthetic
ccgttttttttttttcactaccc

SEQ ID NO: 20370 - DNA, 23 bp, Artificial Sequence
  Synthetic
ccgttttttttttttccactacc

SEQ ID NO: 20371 - DNA, 23 bp, Artificial Sequence
  Synthetic
ccgttttttttttttaaaaacac

SEQ ID NO: 20372 - DNA, 23 bp, Artificial Sequence
  Synthetic
ccgttttttttttttcactaccc

SEQ ID NO: 20373 - DNA, 23 bp, Artificial Sequence
  Synthetic
ccgttttttttttttacagctct

SEQ ID NO: 20374 - DNA, 23 bp, Artificial Sequence
  Synthetic
ccgttttttttttttccgatata

SEQ ID NO: 20375 - DNA, 23 bp, Artificial Sequence
  Synthetic
ccgttttttttttttcaattacc

SEQ ID NO: 20376 - DNA, 23 bp, Artificial Sequence
  Synthetic
ccgttttttttttttattacact

SEQ ID NO: 20377 - DNA, 23 bp, Artificial Sequence
  Synthetic
ccgttttttttttttcaccgagg

SEQ ID NO: 20378 - DNA, 23 bp, Artificial Sequence
  Synthetic
ccgttttttttttttaactggaa

SEQ ID NO: 20379 - DNA, 23 bp, Artificial Sequence
  Synthetic
ccgttttttttttttatggccat

SEQ ID NO: 20380 - DNA, 23 bp, Artificial Sequence
  Synthetic
ccgttttttttttttaccaccaa

SEQ ID NO: 20381 - DNA, 23 bp, Artificial Sequence
  Synthetic
ccgttttttttttttgatcacaa

SEQ ID NO: 20382 - DNA, 23 bp, Artificial Sequence
  Synthetic
ccgttttttttttttaataaccc

SEQ ID NO: 20383 - DNA, 23 bp, Artificial Sequence
  Synthetic
ccgttttttttttttgaaataca

SEQ ID NO: 20384 - DNA, 23 bp, Artificial Sequence
  Synthetic
ccgttttttttttttccaaatta

SEQ ID NO: 20385 - DNA, 23 bp, Artificial Sequence
  Synthetic
ccgttttttttttttactttggt

SEQ ID NO: 20386 - DNA, 23 bp, Artificial Sequence
  Synthetic
ccgttttttttttttactaaatc

SEQ ID NO: 20387 - DNA, 23 bp, Artificial Sequence
  Synthetic
ccgttttttttttttaacgaaat

SEQ ID NO: 20388 - DNA, 23 bp, Artificial Sequence
  Synthetic
ccgttttttttttttgcaaatca

SEQ ID NO: 20389 - DNA, 23 bp, Artificial Sequence
  Synthetic
ccgttttttttttttcatcgtta

SEQ ID NO: 20390 - DNA, 23 bp, Artificial Sequence
  Synthetic
ccgttttttttttttacttgaaa

SEQ ID NO: 20391 - DNA, 23 bp, Artificial Sequence
  Synthetic
ccgttttttttttttatttgaag

SEQ ID NO: 20392 - DNA, 23 bp, Artificial Sequence
  Synthetic
ccgttttttttttttaattaact

SEQ ID NO: 20393 - DNA, 23 bp, Artificial Sequence
  Synthetic
ccgttttttttttttctcactct

SEQ ID NO: 20394 - DNA, 23 bp, Artificial Sequence
  Synthetic
ccgttttttttttttgagctccc

SEQ ID NO: 20395 - DNA, 23 bp, Artificial Sequence
  Synthetic
ccgttttttttttttgagctccc

SEQ ID NO: 20396 - DNA, 23 bp, Artificial Sequence
  Synthetic
ccgttttttttttttgagctccc

SEQ ID NO: 20397 - DNA, 23 bp, Artificial Sequence
  Synthetic
ccgttttttttttttgagctccc

SEQ ID NO: 20398 - DNA, 23 bp, Artificial Sequence
  Synthetic
ccgttttttttttttgagctcct

SEQ ID NO: 20399 - DNA, 23 bp, Artificial Sequence
  Synthetic
ccgttttttttttttgatcatgc

SEQ ID NO: 20400 - DNA, 23 bp, Artificial Sequence
  Synthetic
ccgttttttttttttgatcatgc

SEQ ID NO: 20401 - DNA, 23 bp, Artificial Sequence
  Synthetic
ccgttttttttttttccgatctg

SEQ ID NO: 20402 - DNA, 23 bp, Artificial Sequence
  Synthetic
ccgttttttttttttccgatctg

SEQ ID NO: 20403 - DNA, 23 bp, Artificial Sequence
  Synthetic
ccgttttttttttttgttcaaga

SEQ ID NO: 20404 - DNA, 23 bp, Artificial Sequence
  Synthetic
ccgttttttttttttcagggaag

SEQ ID NO: 20405 - DNA, 23 bp, Artificial Sequence
  Synthetic
ccgttttttttttttcagggaag

SEQ ID NO: 20406 - DNA, 23 bp, Artificial Sequence
  Synthetic
ccgttttttttttttcagggaag

SEQ ID NO: 20407 - DNA, 23 bp, Artificial Sequence
  Synthetic
ccgttttttttttttcagggaag

SEQ ID NO: 20408 - DNA, 23 bp, Artificial Sequence
  Synthetic
ccgttttttttttttcagggaag

SEQ ID NO: 20409 - DNA, 23 bp, Artificial Sequence
  Synthetic
ccgttttttttttttccatacaa

SEQ ID NO: 20410 - DNA, 23 bp, Artificial Sequence
  Synthetic
ccgttttttttttttctatacaa

SEQ ID NO: 20411 - DNA, 23 bp, Artificial Sequence
  Synthetic
ccgttttttttttttcacaaact

SEQ ID NO: 20412 - DNA, 23 bp, Artificial Sequence
  Synthetic
ccgttttttttttttagccctgt

SEQ ID NO: 20413 - DNA, 23 bp, Artificial Sequence
  Synthetic
ccgttttttttttttaggagtct

SEQ ID NO: 20414 - DNA, 23 bp, Artificial Sequence
  Synthetic
ccgttttttttttttaggagtct

SEQ ID NO: 20415 - DNA, 23 bp, Artificial Sequence
  Synthetic
ccgttttttttttttacctgcac

SEQ ID NO: 20416 - DNA, 23 bp, Artificial Sequence
  Synthetic
ccgttttttttttttagccctgt

SEQ ID NO: 20417 - DNA, 23 bp, Artificial Sequence
  Synthetic
ccgttttttttttttaaacacca

SEQ ID NO: 20418 - DNA, 23 bp, Artificial Sequence
  Synthetic
ccgttttttttttttcattcacc

SEQ ID NO: 20419 - DNA, 23 bp, Artificial Sequence
  Synthetic
ccgttttttttttttcaagttag

SEQ ID NO: 20420 - DNA, 23 bp, Artificial Sequence
  Synthetic
ccgttttttttttttaagagacc

SEQ ID NO: 20421 - DNA, 23 bp, Artificial Sequence
  Synthetic
ccgttttttttttttcataggaa

SEQ ID NO: 20422 - DNA, 23 bp, Artificial Sequence
  Synthetic
ccgttttttttttttatcatcaa

SEQ ID NO: 20423 - DNA, 23 bp, Artificial Sequence
  Synthetic
ccgttttttttttttacacgtgc

SEQ ID NO: 20424 - DNA, 23 bp, Artificial Sequence
  Synthetic
ccgttttttttttttccataggg

SEQ ID NO: 20425 - DNA, 23 bp, Artificial Sequence
  Synthetic
ccgttttttttttttgggattcc

SEQ ID NO: 20426 - DNA, 23 bp, Artificial Sequence
  Synthetic
ccgttttttttttttaaagttct

SEQ ID NO: 20427 - DNA, 23 bp, Artificial Sequence
  Synthetic
ccgttttttttttttcttttgtg

SEQ ID NO: 20428 - DNA, 23 bp, Artificial Sequence
  Synthetic
ccgttttttttttttaaccatga

SEQ ID NO: 20429 - DNA, 23 bp, Artificial Sequence
  Synthetic
ccgttttttttttttgcactaga

SEQ ID NO: 20430 - DNA, 23 bp, Artificial Sequence
  Synthetic
ccgttttttttttttcccaccga

SEQ ID NO: 20431 - DNA, 23 bp, Artificial Sequence
  Synthetic
ccgttttttttttttcaccgaca

SEQ ID NO: 20432 - DNA, 23 bp, Artificial Sequence
  Synthetic
ccgttttttttttttgtgaattc

SEQ ID NO: 20433 - DNA, 23 bp, Artificial Sequence
  Synthetic
ccgttttttttttttccttatca

SEQ ID NO: 20434 - DNA, 23 bp, Artificial Sequence
  Synthetic
ccgttttttttttttgcccaaaa

SEQ ID NO: 20435 - DNA, 23 bp, Artificial Sequence
  Synthetic
ccgttttttttttttaacaacat

SEQ ID NO: 20436 - DNA, 23 bp, Artificial Sequence
  Synthetic
ccgttttttttttttgttttgca

SEQ ID NO: 20437 - DNA, 23 bp, Artificial Sequence
  Synthetic
ccgttttttttttttctgcacta

SEQ ID NO: 20438 - DNA, 23 bp, Artificial Sequence
  Synthetic
ccgttttttttttttgcatagga

SEQ ID NO: 20439 - DNA, 23 bp, Artificial Sequence
  Synthetic
ccgttttttttttttgactccgg

SEQ ID NO: 20440 - DNA, 23 bp, Artificial Sequence
  Synthetic
ccgttttttttttttacatcagt

SEQ ID NO: 20441 - DNA, 23 bp, Artificial Sequence
  Synthetic
ccgttttttttttttcctgtctg

SEQ ID NO: 20442 - DNA, 23 bp, Artificial Sequence
  Synthetic
ccgttttttttttttcagttgcc

SEQ ID NO: 20443 - DNA, 23 bp, Artificial Sequence
  Synthetic
ccgttttttttttttcaatcagt

SEQ ID NO: 20444 - DNA, 23 bp, Artificial Sequence
  Synthetic
ccgttttttttttttacggaacc

SEQ ID NO: 20445 - DNA, 23 bp, Artificial Sequence
  Synthetic
ccgttttttttttttaaatccct

SEQ ID NO: 20446 - DNA, 23 bp, Artificial Sequence
  Synthetic
ccgttttttttttttcctgctga

SEQ ID NO: 20447 - DNA, 23 bp, Artificial Sequence
  Synthetic
ccgttttttttttttcctatcct

SEQ ID NO: 20448 - DNA, 23 bp, Artificial Sequence
  Synthetic
ccgttttttttttttggaactta

SEQ ID NO: 20449 - DNA, 23 bp, Artificial Sequence
  Synthetic
ccgttttttttttttaatagagt

SEQ ID NO: 20450 - DNA, 23 bp, Artificial Sequence
  Synthetic
ccgttttttttttttgatttcaa

SEQ ID NO: 20451 - DNA, 23 bp, Artificial Sequence
  Synthetic
ccgttttttttttttccgatttc

SEQ ID NO: 20452 - DNA, 23 bp, Artificial Sequence
  Synthetic
ccgttttttttttttgacaatac

SEQ ID NO: 20453 - DNA, 23 bp, Artificial Sequence
  Synthetic
ccgttttttttttttgagagtgt

SEQ ID NO: 20454 - DNA, 23 bp, Artificial Sequence
  Synthetic
ccgttttttttttttaacttagt

SEQ ID NO: 20455 - DNA, 23 bp, Artificial Sequence
  Synthetic
ccgttttttttttttaggtcgac

SEQ ID NO: 20456 - DNA, 23 bp, Artificial Sequence
  Synthetic
ccgttttttttttttacttactg

SEQ ID NO: 20457 - DNA, 23 bp, Artificial Sequence
  Synthetic
ccgttttttttttttgaggaagg

SEQ ID NO: 20458 - DNA, 23 bp, Artificial Sequence
  Synthetic
ccgttttttttttttcaaaatca

SEQ ID NO: 20459 - DNA, 23 bp, Artificial Sequence
  Synthetic
ccgttttttttttttacagctag

SEQ ID NO: 20460 - DNA, 23 bp, Artificial Sequence
  Synthetic
ccgttttttttttttacagctag

SEQ ID NO: 20461 - DNA, 23 bp, Artificial Sequence
  Synthetic
ccgttttttttttttcaataaat

SEQ ID NO: 20462 - DNA, 23 bp, Artificial Sequence
  Synthetic
ccgttttttttttttcagggcat

SEQ ID NO: 20463 - DNA, 23 bp, Artificial Sequence
  Synthetic
ccgttttttttttttggctcatt

SEQ ID NO: 20464 - DNA, 23 bp, Artificial Sequence
  Synthetic
ccgttttttttttttctatacaa

SEQ ID NO: 20465 - DNA, 23 bp, Artificial Sequence
  Synthetic
ccgttttttttttttccacacaa

SEQ ID NO: 20466 - DNA, 23 bp, Artificial Sequence
  Synthetic
ccgttttttttttttccatacaa

SEQ ID NO: 20467 - DNA, 23 bp, Artificial Sequence
  Synthetic
ccgttttttttttttctattcaa

SEQ ID NO: 20468 - DNA, 23 bp, Artificial Sequence
  Synthetic
ccgttttttttttttctatacaa

SEQ ID NO: 20469 - DNA, 23 bp, Artificial Sequence
  Synthetic
ccgttttttttttttcaacacaa

SEQ ID NO: 20470 - DNA, 23 bp, Artificial Sequence
  Synthetic
ccgttttttttttttcagcacaa

SEQ ID NO: 20471 - DNA, 23 bp, Artificial Sequence
  Synthetic
ccgttttttttttttctgtacaa

SEQ ID NO: 20472 - DNA, 23 bp, Artificial Sequence
  Synthetic
ccgttttttttttttcatacttc

SEQ ID NO: 20473 - DNA, 23 bp, Artificial Sequence
  Synthetic
ccgttttttttttttcaagttcg

SEQ ID NO: 20474 - DNA, 23 bp, Artificial Sequence
  Synthetic
ccgttttttttttttagttatca

SEQ ID NO: 20475 - DNA, 23 bp, Artificial Sequence
  Synthetic
ccgttttttttttttagttatca

SEQ ID NO: 20476 - DNA, 23 bp, Artificial Sequence
  Synthetic
ccgttttttttttttagccctgt

SEQ ID NO: 20477 - DNA, 23 bp, Artificial Sequence
  Synthetic
ccgttttttttttttagccctgt

SEQ ID NO: 20478 - DNA, 23 bp, Artificial Sequence
  Synthetic
ccgttttttttttttcaaattcg

SEQ ID NO: 20479 - DNA, 23 bp, Artificial Sequence
  Synthetic
ccgttttttttttttaaatccgg

SEQ ID NO: 20480 - DNA, 23 bp, Artificial Sequence
  Synthetic
ccgttttttttttttcacacatt

SEQ ID NO: 20481 - DNA, 23 bp, Artificial Sequence
  Synthetic
ccgttttttttttttaacaccat

SEQ ID NO: 20482 - DNA, 23 bp, Artificial Sequence
  Synthetic
ccgttttttttttttcattcacc

SEQ ID NO: 20483 - DNA, 23 bp, Artificial Sequence
  Synthetic
ccgttttttttttttcaggttaa

SEQ ID NO: 20484 - DNA, 23 bp, Artificial Sequence
  Synthetic
ccgttttttttttttcaagttag

SEQ ID NO: 20485 - DNA, 23 bp, Artificial Sequence
  Synthetic
ccgttttttttttttattattac

SEQ ID NO: 20486 - DNA, 23 bp, Artificial Sequence
  Synthetic
ccgttttttttttttaagagacc

SEQ ID NO: 20487 - DNA, 23 bp, Artificial Sequence
  Synthetic
ccgttttttttttttcaagccca

SEQ ID NO: 20488 - DNA, 23 bp, Artificial Sequence
  Synthetic
ccgttttttttttttccctttta

SEQ ID NO: 20489 - DNA, 23 bp, Artificial Sequence
  Synthetic
ccgttttttttttttaccatggc

SEQ ID NO: 20490 - DNA, 23 bp, Artificial Sequence
  Synthetic
ccgttttttttttttgctggttg

SEQ ID NO: 20491 - DNA, 23 bp, Artificial Sequence
  Synthetic
ccgttttttttttttcataggaa

SEQ ID NO: 20492 - DNA, 23 bp, Artificial Sequence
  Synthetic
ccgttttttttttttgataggaa

SEQ ID NO: 20493 - DNA, 23 bp, Artificial Sequence
  Synthetic
ccgttttttttttttgcgtattc

SEQ ID NO: 20494 - DNA, 23 bp, Artificial Sequence
  Synthetic
ccgttttttttttttcctgattc

SEQ ID NO: 20495 - DNA, 23 bp, Artificial Sequence
  Synthetic
ccgttttttttttttccataggg

SEQ ID NO: 20496 - DNA, 23 bp, Artificial Sequence
  Synthetic
ccgttttttttttttagtgcttt

SEQ ID NO: 20497 - DNA, 23 bp, Artificial Sequence
  Synthetic
ccgttttttttttttagtgcttt

SEQ ID NO: 20498 - DNA, 23 bp, Artificial Sequence
  Synthetic
ccgttttttttttttacatcatc

SEQ ID NO: 20499 - DNA, 23 bp, Artificial Sequence
  Synthetic
ccgttttttttttttaaagttct

SEQ ID NO: 20500 - DNA, 23 bp, Artificial Sequence
  Synthetic
ccgttttttttttttaaagttct

SEQ ID NO: 20501 - DNA, 23 bp, Artificial Sequence
  Synthetic
ccgttttttttttttcacttttg

SEQ ID NO: 20502 - DNA, 23 bp, Artificial Sequence
  Synthetic
ccgttttttttttttcatttttg

SEQ ID NO: 20503 - DNA, 23 bp, Artificial Sequence
  Synthetic
ccgttttttttttttcaaaccat

SEQ ID NO: 20504 - DNA, 23 bp, Artificial Sequence
  Synthetic
ccgttttttttttttaaaccatg

SEQ ID NO: 20505 - DNA, 23 bp, Artificial Sequence
  Synthetic
ccgttttttttttttcaatattt

SEQ ID NO: 20506 - DNA, 23 bp, Artificial Sequence
  Synthetic
ccgttttttttttttctgcactg

SEQ ID NO: 20507 - DNA, 23 bp, Artificial Sequence
  Synthetic
ccgttttttttttttgcactaga

SEQ ID NO: 20508 - DNA, 23 bp, Artificial Sequence
  Synthetic
ccgttttttttttttcaccgaca

SEQ ID NO: 20509 - DNA, 23 bp, Artificial Sequence
  Synthetic
ccgttttttttttttacaatcaa

SEQ ID NO: 20510 - DNA, 23 bp, Artificial Sequence
  Synthetic
ccgttttttttttttcaccgaca

SEQ ID NO: 20511 - DNA, 23 bp, Artificial Sequence
  Synthetic
ccgttttttttttttggcaagtc

SEQ ID NO: 20512 - DNA, 23 bp, Artificial Sequence
  Synthetic
ccgttttttttttttgtgaattc

SEQ ID NO: 20513 - DNA, 23 bp, Artificial Sequence
  Synthetic
ccgttttttttttttcttatcag

SEQ ID NO: 20514 - DNA, 23 bp, Artificial Sequence
  Synthetic
ccgttttttttttttctgcaaca

SEQ ID NO: 20515 - DNA, 23 bp, Artificial Sequence
  Synthetic
ccgttttttttttttctaatata

SEQ ID NO: 20516 - DNA, 23 bp, Artificial Sequence
  Synthetic
ccgttttttttttttctgtcaat

SEQ ID NO: 20517 - DNA, 23 bp, Artificial Sequence
  Synthetic
ccgttttttttttttgggacttt

SEQ ID NO: 20518 - DNA, 23 bp, Artificial Sequence
  Synthetic
ccgttttttttttttacatggag

SEQ ID NO: 20519 - DNA, 23 bp, Artificial Sequence
  Synthetic
ccgttttttttttttcaacaaca

SEQ ID NO: 20520 - DNA, 23 bp, Artificial Sequence
  Synthetic
ccgttttttttttttcaacaact

SEQ ID NO: 20521 - DNA, 23 bp, Artificial Sequence
  Synthetic
ccgttttttttttttacaggtag

SEQ ID NO: 20522 - DNA, 23 bp, Artificial Sequence
  Synthetic
ccgttttttttttttgttttgca

SEQ ID NO: 20523 - DNA, 23 bp, Artificial Sequence
  Synthetic
ccgttttttttttttgttttgca

SEQ ID NO: 20524 - DNA, 23 bp, Artificial Sequence
  Synthetic
ccgttttttttttttcctgcact

SEQ ID NO: 20525 - DNA, 23 bp, Artificial Sequence
  Synthetic
ccgttttttttttttatcgttac

SEQ ID NO: 20526 - DNA, 23 bp, Artificial Sequence
  Synthetic
ccgttttttttttttcattacca

SEQ ID NO: 20527 - DNA, 23 bp, Artificial Sequence
  Synthetic
ccgttttttttttttcatgccct

SEQ ID NO: 20528 - DNA, 23 bp, Artificial Sequence
  Synthetic
ccgttttttttttttagtggtcc

SEQ ID NO: 20529 - DNA, 23 bp, Artificial Sequence
  Synthetic
ccgttttttttttttgcatagga

SEQ ID NO: 20530 - DNA, 23 bp, Artificial Sequence
  Synthetic
ccgttttttttttttgcatagga

SEQ ID NO: 20531 - DNA, 23 bp, Artificial Sequence
  Synthetic
ccgttttttttttttgactccgg

SEQ ID NO: 20532 - DNA, 23 bp, Artificial Sequence
  Synthetic
ccgttttttttttttcaacacca

SEQ ID NO: 20533 - DNA, 23 bp, Artificial Sequence
  Synthetic
ccgttttttttttttccgctgtc

SEQ ID NO: 20534 - DNA, 23 bp, Artificial Sequence
  Synthetic
ccgttttttttttttccatgact

SEQ ID NO: 20535 - DNA, 23 bp, Artificial Sequence
  Synthetic
ccgttttttttttttcctgtctg

SEQ ID NO: 20536 - DNA, 23 bp, Artificial Sequence
  Synthetic
ccgttttttttttttcagttgcc

SEQ ID NO: 20537 - DNA, 23 bp, Artificial Sequence
  Synthetic
ccgttttttttttttcagttgcc

SEQ ID NO: 20538 - DNA, 23 bp, Artificial Sequence
  Synthetic
ccgttttttttttttaatcagtt

SEQ ID NO: 20539 - DNA, 23 bp, Artificial Sequence
  Synthetic
ccgttttttttttttcatggtta

SEQ ID NO: 20540 - DNA, 23 bp, Artificial Sequence
  Synthetic
ccgttttttttttttatggttag

SEQ ID NO: 20541 - DNA, 23 bp, Artificial Sequence
  Synthetic
ccgttttttttttttgaattgcg

SEQ ID NO: 20542 - DNA, 23 bp, Artificial Sequence
  Synthetic
ccgttttttttttttaacccagc

SEQ ID NO: 20543 - DNA, 23 bp, Artificial Sequence
  Synthetic
ccgttttttttttttgacccagt

SEQ ID NO: 20544 - DNA, 23 bp, Artificial Sequence
  Synthetic
ccgttttttttttttggtatttg

SEQ ID NO: 20545 - DNA, 23 bp, Artificial Sequence
  Synthetic
ccgttttttttttttagttcttc

SEQ ID NO: 20546 - DNA, 23 bp, Artificial Sequence
  Synthetic
ccgttttttttttttagctcttc

SEQ ID NO: 20547 - DNA, 23 bp, Artificial Sequence
  Synthetic
ccgttttttttttttaaatccct

SEQ ID NO: 20548 - DNA, 23 bp, Artificial Sequence
  Synthetic
ccgttttttttttttaatccctg

SEQ ID NO: 20549 - DNA, 23 bp, Artificial Sequence
  Synthetic
ccgttttttttttttcctgctga

SEQ ID NO: 20550 - DNA, 23 bp, Artificial Sequence
  Synthetic
ccgttttttttttttgaccgaga

SEQ ID NO: 20551 - DNA, 23 bp, Artificial Sequence
  Synthetic
ccgttttttttttttcctatcct

SEQ ID NO: 20552 - DNA, 23 bp, Artificial Sequence
  Synthetic
ccgttttttttttttagaactta

SEQ ID NO: 20553 - DNA, 23 bp, Artificial Sequence
  Synthetic
ccgttttttttttttagaactta

SEQ ID NO: 20554 - DNA, 23 bp, Artificial Sequence
  Synthetic
ccgttttttttttttctgaactt

SEQ ID NO: 20555 - DNA, 23 bp, Artificial Sequence
  Synthetic
ccgttttttttttttccgatttc

SEQ ID NO: 20556 - DNA, 23 bp, Artificial Sequence
  Synthetic
ccgttttttttttttactgattt

SEQ ID NO: 20557 - DNA, 23 bp, Artificial Sequence
  Synthetic
ccgttttttttttttgacaatac

SEQ ID NO: 20558 - DNA, 23 bp, Artificial Sequence
  Synthetic
ccgttttttttttttctgagtgt

SEQ ID NO: 20559 - DNA, 23 bp, Artificial Sequence
  Synthetic
ccgttttttttttttgagagtgt

SEQ ID NO: 20560 - DNA, 23 bp, Artificial Sequence
  Synthetic
ccgttttttttttttcagtcggg

SEQ ID NO: 20561 - DNA, 23 bp, Artificial Sequence
  Synthetic
ccgttttttttttttacaaaatc

SEQ ID NO: 20562 - DNA, 23 bp, Artificial Sequence
  Synthetic
ccgttttttttttttaggatttt

SEQ ID NO: 20563 - DNA, 23 bp, Artificial Sequence
  Synthetic
ccgttttttttttttcgcgagcc

SEQ ID NO: 20564 - DNA, 23 bp, Artificial Sequence
  Synthetic
ccgttttttttttttggcattac

SEQ ID NO: 20565 - DNA, 23 bp, Artificial Sequence
  Synthetic
ccgttttttttttttatgtagtc

SEQ ID NO: 20566 - DNA, 23 bp, Artificial Sequence
  Synthetic
ccgttttttttttttagaaccat

SEQ ID NO: 20567 - DNA, 23 bp, Artificial Sequence
  Synthetic
ccgttttttttttttccacattg

SEQ ID NO: 20568 - DNA, 23 bp, Artificial Sequence
  Synthetic
ccgttttttttttttagccgtac

SEQ ID NO: 20569 - DNA, 23 bp, Artificial Sequence
  Synthetic
ccgttttttttttttaacaaaat

SEQ ID NO: 20570 - DNA, 23 bp, Artificial Sequence
  Synthetic
ccgttttttttttttacagctag

SEQ ID NO: 20571 - DNA, 23 bp, Artificial Sequence
  Synthetic
ccgttttttttttttaggccggg

SEQ ID NO: 20572 - DNA, 23 bp, Artificial Sequence
  Synthetic
ccgttttttttttttcaaaaatg

SEQ ID NO: 20573 - DNA, 23 bp, Artificial Sequence
  Synthetic
ccgttttttttttttagctggtt

SEQ ID NO: 20574 - DNA, 23 bp, Artificial Sequence
  Synthetic
ccgttttttttttttactgcact

SEQ ID NO: 20575 - DNA, 23 bp, Artificial Sequence
  Synthetic
ccgttttttttttttgttttgca

SEQ ID NO: 20576 - DNA, 23 bp, Artificial Sequence
  Synthetic
ccgttttttttttttcctgcact

SEQ ID NO: 20577 - DNA, 23 bp, Artificial Sequence
  Synthetic
ccgttttttttttttcccaaaac

SEQ ID NO: 20578 - DNA, 23 bp, Artificial Sequence
  Synthetic
ccgttttttttttttaccgaact

SEQ ID NO: 20579 - DNA, 23 bp, Artificial Sequence
  Synthetic
ccgttttttttttttgcattacc

SEQ ID NO: 20580 - DNA, 23 bp, Artificial Sequence
  Synthetic
ccgttttttttttttctatacaa

SEQ ID NO: 20581 - DNA, 23 bp, Artificial Sequence
  Synthetic
ccgttttttttttttctacacaa

SEQ ID NO: 20582 - DNA, 23 bp, Artificial Sequence
  Synthetic
ccgttttttttttttccatacaa

SEQ ID NO: 20583 - DNA, 23 bp, Artificial Sequence
  Synthetic
ccgttttttttttttctaaacaa

SEQ ID NO: 20584 - DNA, 23 bp, Artificial Sequence
  Synthetic
ccgttttttttttttatacaatc

SEQ ID NO: 20585 - DNA, 23 bp, Artificial Sequence
  Synthetic
ccgttttttttttttgtacaaac

SEQ ID NO: 20586 - DNA, 23 bp, Artificial Sequence
  Synthetic
ccgttttttttttttagcacaaa

SEQ ID NO: 20587 - DNA, 23 bp, Artificial Sequence
  Synthetic
ccgttttttttttttcaagttcg

SEQ ID NO: 20588 - DNA, 23 bp, Artificial Sequence
  Synthetic
ccgttttttttttttagttatca

SEQ ID NO: 20589 - DNA, 23 bp, Artificial Sequence
  Synthetic
ccgttttttttttttagccctgt

SEQ ID NO: 20590 - DNA, 23 bp, Artificial Sequence
  Synthetic
ccgttttttttttttcctgcact

SEQ ID NO: 20591 - DNA, 23 bp, Artificial Sequence
  Synthetic
ccgttttttttttttagccctgt

SEQ ID NO: 20592 - DNA, 23 bp, Artificial Sequence
  Synthetic
ccgttttttttttttcaaattcg

SEQ ID NO: 20593 - DNA, 23 bp, Artificial Sequence
  Synthetic
ccgttttttttttttaaattcgg

SEQ ID NO: 20594 - DNA, 23 bp, Artificial Sequence
  Synthetic
ccgttttttttttttaaattcga

SEQ ID NO: 20595 - DNA, 23 bp, Artificial Sequence
  Synthetic
ccgttttttttttttaaacacca

SEQ ID NO: 20596 - DNA, 23 bp, Artificial Sequence
  Synthetic
ccgttttttttttttcattcacc

SEQ ID NO: 20597 - DNA, 23 bp, Artificial Sequence
  Synthetic
ccgttttttttttttcaggttaa

SEQ ID NO: 20598 - DNA, 23 bp, Artificial Sequence
  Synthetic
ccgttttttttttttcaagttag

SEQ ID NO: 20599 - DNA, 23 bp, Artificial Sequence
  Synthetic
ccgttttttttttttattattac

SEQ ID NO: 20600 - DNA, 23 bp, Artificial Sequence
  Synthetic
ccgttttttttttttcgtaccaa

SEQ ID NO: 20601 - DNA, 23 bp, Artificial Sequence
  Synthetic
ccgttttttttttttaagagacc

SEQ ID NO: 20602 - DNA, 23 bp, Artificial Sequence
  Synthetic
ccgttttttttttttaagcccag

SEQ ID NO: 20603 - DNA, 23 bp, Artificial Sequence
  Synthetic
ccgttttttttttttccctttta

SEQ ID NO: 20604 - DNA, 23 bp, Artificial Sequence
  Synthetic
ccgttttttttttttccctttca

SEQ ID NO: 20605 - DNA, 23 bp, Artificial Sequence
  Synthetic
ccgttttttttttttccctttta

SEQ ID NO: 20606 - DNA, 23 bp, Artificial Sequence
  Synthetic
ccgttttttttttttaccatggc

SEQ ID NO: 20607 - DNA, 23 bp, Artificial Sequence
  Synthetic
ccgttttttttttttagctggtt

SEQ ID NO: 20608 - DNA, 23 bp, Artificial Sequence
  Synthetic
ccgttttttttttttctggttga

SEQ ID NO: 20609 - DNA, 23 bp, Artificial Sequence
  Synthetic
ccgttttttttttttagctggtt

SEQ ID NO: 20610 - DNA, 23 bp, Artificial Sequence
  Synthetic
ccgttttttttttttggctggtt

SEQ ID NO: 20611 - DNA, 23 bp, Artificial Sequence
  Synthetic
ccgttttttttttttcataggaa

SEQ ID NO: 20612 - DNA, 23 bp, Artificial Sequence
  Synthetic
ccgttttttttttttcgcgtatt

SEQ ID NO: 20613 - DNA, 23 bp, Artificial Sequence
  Synthetic
ccgttttttttttttcacaacac

SEQ ID NO: 20614 - DNA, 23 bp, Artificial Sequence
  Synthetic
ccgttttttttttttacacatgc

SEQ ID NO: 20615 - DNA, 23 bp, Artificial Sequence
  Synthetic
ccgttttttttttttccataggg

SEQ ID NO: 20616 - DNA, 23 bp, Artificial Sequence
  Synthetic
ccgttttttttttttataaagta

SEQ ID NO: 20617 - DNA, 23 bp, Artificial Sequence
  Synthetic
ccgttttttttttttgtgctttc

SEQ ID NO: 20618 - DNA, 23 bp, Artificial Sequence
  Synthetic
ccgttttttttttttagctacag

SEQ ID NO: 20619 - DNA, 23 bp, Artificial Sequence
  Synthetic
ccgttttttttttttacatcatc

SEQ ID NO: 20620 - DNA, 23 bp, Artificial Sequence
  Synthetic
ccgttttttttttttgggattcc

SEQ ID NO: 20621 - DNA, 23 bp, Artificial Sequence
  Synthetic
ccgttttttttttttcctatgga

SEQ ID NO: 20622 - DNA, 23 bp, Artificial Sequence
  Synthetic
ccgttttttttttttaaagttct

SEQ ID NO: 20623 - DNA, 23 bp, Artificial Sequence
  Synthetic
ccgttttttttttttaaagttct

SEQ ID NO: 20624 - DNA, 23 bp, Artificial Sequence
  Synthetic
ccgttttttttttttggtacaag

SEQ ID NO: 20625 - DNA, 23 bp, Artificial Sequence
  Synthetic
ccgttttttttttttcttttgtg

SEQ ID NO: 20626 - DNA, 23 bp, Artificial Sequence
  Synthetic
ccgttttttttttttcctatcac

SEQ ID NO: 20627 - DNA, 23 bp, Artificial Sequence
  Synthetic
ccgttttttttttttcaaaccat

SEQ ID NO: 20628 - DNA, 23 bp, Artificial Sequence
  Synthetic
ccgttttttttttttaaatcatg

SEQ ID NO: 20629 - DNA, 23 bp, Artificial Sequence
  Synthetic
ccgttttttttttttaaaccatg

SEQ ID NO: 20630 - DNA, 23 bp, Artificial Sequence
  Synthetic
ccgttttttttttttccaatatt

SEQ ID NO: 20631 - DNA, 23 bp, Artificial Sequence
  Synthetic
ccgttttttttttttccaatatt

SEQ ID NO: 20632 - DNA, 23 bp, Artificial Sequence
  Synthetic
ccgttttttttttttcagtattt

SEQ ID NO: 20633 - DNA, 23 bp, Artificial Sequence
  Synthetic
ccgttttttttttttaagtgcct

SEQ ID NO: 20634 - DNA, 23 bp, Artificial Sequence
  Synthetic
ccgttttttttttttacctgcac

SEQ ID NO: 20635 - DNA, 23 bp, Artificial Sequence
  Synthetic
ccgttttttttttttcaccgaca

SEQ ID NO: 20636 - DNA, 23 bp, Artificial Sequence
  Synthetic
ccgttttttttttttcagtcaac

SEQ ID NO: 20637 - DNA, 23 bp, Artificial Sequence
  Synthetic
ccgttttttttttttcaccgaca

SEQ ID NO: 20638 - DNA, 23 bp, Artificial Sequence
  Synthetic
ccgttttttttttttagttctac

SEQ ID NO: 20639 - DNA, 23 bp, Artificial Sequence
  Synthetic
ccgttttttttttttggcaagtc

SEQ ID NO: 20640 - DNA, 23 bp, Artificial Sequence
  Synthetic
ccgttttttttttttgtgaattc

SEQ ID NO: 20641 - DNA, 23 bp, Artificial Sequence
  Synthetic
ccgttttttttttttccttatca

SEQ ID NO: 20642 - DNA, 23 bp, Artificial Sequence
  Synthetic
ccgttttttttttttctgcaaca

SEQ ID NO: 20643 - DNA, 23 bp, Artificial Sequence
  Synthetic
ccgttttttttttttgatatcag

SEQ ID NO: 20644 - DNA, 23 bp, Artificial Sequence
  Synthetic
ccgttttttttttttgcactaga

SEQ ID NO: 20645 - DNA, 23 bp, Artificial Sequence
  Synthetic
ccgttttttttttttactgcact

SEQ ID NO: 20646 - DNA, 23 bp, Artificial Sequence
  Synthetic
ccgttttttttttttctgctttt

SEQ ID NO: 20647 - DNA, 23 bp, Artificial Sequence
  Synthetic
ccgttttttttttttctgtcaat

SEQ ID NO: 20648 - DNA, 23 bp, Artificial Sequence
  Synthetic
ccgttttttttttttagcgggac

SEQ ID NO: 20649 - DNA, 23 bp, Artificial Sequence
  Synthetic
ccgttttttttttttacatggag

SEQ ID NO: 20650 - DNA, 23 bp, Artificial Sequence
  Synthetic
ccgttttttttttttaacaacat

SEQ ID NO: 20651 - DNA, 23 bp, Artificial Sequence
  Synthetic
ccgttttttttttttaacaacat

SEQ ID NO: 20652 - DNA, 23 bp, Artificial Sequence
  Synthetic
ccgttttttttttttacaggtag

SEQ ID NO: 20653 - DNA, 23 bp, Artificial Sequence
  Synthetic
ccgttttttttttttccaatgtg

SEQ ID NO: 20654 - DNA, 23 bp, Artificial Sequence
  Synthetic
ccgttttttttttttacacgtag

SEQ ID NO: 20655 - DNA, 23 bp, Artificial Sequence
  Synthetic
ccgttttttttttttgttttgca

SEQ ID NO: 20656 - DNA, 23 bp, Artificial Sequence
  Synthetic
ccgttttttttttttgttttgca

SEQ ID NO: 20657 - DNA, 23 bp, Artificial Sequence
  Synthetic
ccgttttttttttttatacttct

SEQ ID NO: 20658 - DNA, 23 bp, Artificial Sequence
  Synthetic
ccgttttttttttttatacttct

SEQ ID NO: 20659 - DNA, 23 bp, Artificial Sequence
  Synthetic
ccgttttttttttttatcgttac

SEQ ID NO: 20660 - DNA, 23 bp, Artificial Sequence
  Synthetic
ccgttttttttttttatcattac

SEQ ID NO: 20661 - DNA, 23 bp, Artificial Sequence
  Synthetic
ccgttttttttttttcatgccct

SEQ ID NO: 20662 - DNA, 23 bp, Artificial Sequence
  Synthetic
ccgttttttttttttagaggtat

SEQ ID NO: 20663 - DNA, 23 bp, Artificial Sequence
  Synthetic
ccgttttttttttttagtggtcc

SEQ ID NO: 20664 - DNA, 23 bp, Artificial Sequence
  Synthetic
ccgttttttttttttgcatagga

SEQ ID NO: 20665 - DNA, 23 bp, Artificial Sequence
  Synthetic
ccgttttttttttttgactccgg

SEQ ID NO: 20666 - DNA, 23 bp, Artificial Sequence
  Synthetic
ccgttttttttttttggatccgg

SEQ ID NO: 20667 - DNA, 23 bp, Artificial Sequence
  Synthetic
ccgttttttttttttacacactt

SEQ ID NO: 20668 - DNA, 23 bp, Artificial Sequence
  Synthetic
ccgttttttttttttaagcttta

SEQ ID NO: 20669 - DNA, 23 bp, Artificial Sequence
  Synthetic
ccgttttttttttttcctgcact

SEQ ID NO: 20670 - DNA, 23 bp, Artificial Sequence
  Synthetic
ccgttttttttttttgtgctcat

SEQ ID NO: 20671 - DNA, 23 bp, Artificial Sequence
  Synthetic
ccgttttttttttttcctgcact

SEQ ID NO: 20672 - DNA, 23 bp, Artificial Sequence
  Synthetic
ccgttttttttttttccgctgtc

SEQ ID NO: 20673 - DNA, 23 bp, Artificial Sequence
  Synthetic
ccgttttttttttttccatgact

SEQ ID NO: 20674 - DNA, 23 bp, Artificial Sequence
  Synthetic
ccgttttttttttttcctgtctg

SEQ ID NO: 20675 - DNA, 23 bp, Artificial Sequence
  Synthetic
ccgttttttttttttctgtcatt

SEQ ID NO: 20676 - DNA, 23 bp, Artificial Sequence
  Synthetic
ccgttttttttttttcagttgcc

SEQ ID NO: 20677 - DNA, 23 bp, Artificial Sequence
  Synthetic
ccgttttttttttttcaatcagt

SEQ ID NO: 20678 - DNA, 23 bp, Artificial Sequence
  Synthetic
ccgttttttttttttatggttag

SEQ ID NO: 20679 - DNA, 23 bp, Artificial Sequence
  Synthetic
ccgttttttttttttaattgcgt

SEQ ID NO: 20680 - DNA, 23 bp, Artificial Sequence
  Synthetic
ccgttttttttttttagttcttc

SEQ ID NO: 20681 - DNA, 23 bp, Artificial Sequence
  Synthetic
ccgttttttttttttagcttgcc

SEQ ID NO: 20682 - DNA, 23 bp, Artificial Sequence
  Synthetic
ccgttttttttttttaacccagc

SEQ ID NO: 20683 - DNA, 23 bp, Artificial Sequence
  Synthetic
ccgttttttttttttgacccagt

SEQ ID NO: 20684 - DNA, 23 bp, Artificial Sequence
  Synthetic
ccgttttttttttttggtatttg

SEQ ID NO: 20685 - DNA, 23 bp, Artificial Sequence
  Synthetic
ccgttttttttttttaaatccct

SEQ ID NO: 20686 - DNA, 23 bp, Artificial Sequence
  Synthetic
ccgttttttttttttaatccctg

SEQ ID NO: 20687 - DNA, 23 bp, Artificial Sequence
  Synthetic
ccgttttttttttttcctgctga

SEQ ID NO: 20688 - DNA, 23 bp, Artificial Sequence
  Synthetic
ccgttttttttttttcctgctga

SEQ ID NO: 20689 - DNA, 23 bp, Artificial Sequence
  Synthetic
ccgttttttttttttgaccgaga

SEQ ID NO: 20690 - DNA, 23 bp, Artificial Sequence
  Synthetic
ccgttttttttttttctatcctg

SEQ ID NO: 20691 - DNA, 23 bp, Artificial Sequence
  Synthetic
ccgttttttttttttggaactta

SEQ ID NO: 20692 - DNA, 23 bp, Artificial Sequence
  Synthetic
ccgttttttttttttagaactta

SEQ ID NO: 20693 - DNA, 23 bp, Artificial Sequence
  Synthetic
ccgttttttttttttgaacttag

SEQ ID NO: 20694 - DNA, 23 bp, Artificial Sequence
  Synthetic
ccgttttttttttttccgatttc

SEQ ID NO: 20695 - DNA, 23 bp, Artificial Sequence
  Synthetic
ccgttttttttttttcactgatt

SEQ ID NO: 20696 - DNA, 23 bp, Artificial Sequence
  Synthetic
ccgttttttttttttcgatttca

SEQ ID NO: 20697 - DNA, 23 bp, Artificial Sequence
  Synthetic
ccgttttttttttttacaccaag

SEQ ID NO: 20698 - DNA, 23 bp, Artificial Sequence
  Synthetic
ccgttttttttttttcactgatt

SEQ ID NO: 20699 - DNA, 23 bp, Artificial Sequence
  Synthetic
ccgttttttttttttgacaatac

SEQ ID NO: 20700 - DNA, 23 bp, Artificial Sequence
  Synthetic
ccgttttttttttttactaaaac

SEQ ID NO: 20701 - DNA, 23 bp, Artificial Sequence
  Synthetic
ccgttttttttttttgcaaacat

SEQ ID NO: 20702 - DNA, 23 bp, Artificial Sequence
  Synthetic
ccgttttttttttttcagtcgag

SEQ ID NO: 20703 - DNA, 23 bp, Artificial Sequence
  Synthetic
ccgttttttttttttctgagtgt

SEQ ID NO: 20704 - DNA, 23 bp, Artificial Sequence
  Synthetic
ccgttttttttttttgagagtgt

SEQ ID NO: 20705 - DNA, 23 bp, Artificial Sequence
  Synthetic
ccgttttttttttttcagtcggg

SEQ ID NO: 20706 - DNA, 23 bp, Artificial Sequence
  Synthetic
ccgttttttttttttagtcaagg

SEQ ID NO: 20707 - DNA, 23 bp, Artificial Sequence
  Synthetic
ccgttttttttttttgctatgcc

SEQ ID NO: 20708 - DNA, 23 bp, Artificial Sequence
  Synthetic
ccgttttttttttttacaaaatc

SEQ ID NO: 20709 - DNA, 23 bp, Artificial Sequence
  Synthetic
ccgttttttttttttatgcaact

SEQ ID NO: 20710 - DNA, 23 bp, Artificial Sequence
  Synthetic
ccgttttttttttttatgcaaca

SEQ ID NO: 20711 - DNA, 23 bp, Artificial Sequence
  Synthetic
ccgttttttttttttcaaccagc

SEQ ID NO: 20712 - DNA, 23 bp, Artificial Sequence
  Synthetic
ccgttttttttttttatcagcta

SEQ ID NO: 20713 - DNA, 23 bp, Artificial Sequence
  Synthetic
ccgttttttttttttagatggat

SEQ ID NO: 20714 - DNA, 23 bp, Artificial Sequence
  Synthetic
ccgttttttttttttattgcatc

SEQ ID NO: 20715 - DNA, 23 bp, Artificial Sequence
  Synthetic
ccgttttttttttttaggatttt

SEQ ID NO: 20716 - DNA, 23 bp, Artificial Sequence
  Synthetic
ccgttttttttttttccattgct

SEQ ID NO: 20717 - DNA, 23 bp, Artificial Sequence
  Synthetic
ccgttttttttttttccacaatc

SEQ ID NO: 20718 - DNA, 23 bp, Artificial Sequence
  Synthetic
ccgttttttttttttacgggagt

SEQ ID NO: 20719 - DNA, 23 bp, Artificial Sequence
  Synthetic
ccgttttttttttttaccgaact

SEQ ID NO: 20720 - DNA, 23 bp, Artificial Sequence
  Synthetic
ccgttttttttttttggcattac

SEQ ID NO: 20721 - DNA, 23 bp, Artificial Sequence
  Synthetic
ccgttttttttttttcagctaac

SEQ ID NO: 20722 - DNA, 23 bp, Artificial Sequence
  Synthetic
ccgttttttttttttctcagtaa

SEQ ID NO: 20723 - DNA, 23 bp, Artificial Sequence
  Synthetic
ccgttttttttttttatgtagtc

SEQ ID NO: 20724 - DNA, 23 bp, Artificial Sequence
  Synthetic
ccgttttttttttttagccgtac

SEQ ID NO: 20725 - DNA, 23 bp, Artificial Sequence
  Synthetic
ccgttttttttttttaacatcac

SEQ ID NO: 20726 - DNA, 23 bp, Artificial Sequence
  Synthetic
ccgttttttttttttacaaaatc

SEQ ID NO: 20727 - DNA, 23 bp, Artificial Sequence
  Synthetic
ccgttttttttttttacagctag

SEQ ID NO: 20728 - DNA, 23 bp, Artificial Sequence
  Synthetic
ccgttttttttttttcggttatc

SEQ ID NO: 20729 - DNA, 23 bp, Artificial Sequence
  Synthetic
ccgttttttttttttggccggga

SEQ ID NO: 20730 - DNA, 23 bp, Artificial Sequence
  Synthetic
ccgttttttttttttggccggga

SEQ ID NO: 20731 - DNA, 23 bp, Artificial Sequence
  Synthetic
ccgttttttttttttcctgcacg

SEQ ID NO: 20732 - DNA, 23 bp, Artificial Sequence
  Synthetic
ccgttttttttttttcctgcacg

SEQ ID NO: 20733 - DNA, 23 bp, Artificial Sequence
  Synthetic
ccgttttttttttttcaaaaatg

SEQ ID NO: 20734 - DNA, 23 bp, Artificial Sequence
  Synthetic
ccgttttttttttttcaatacaa

SEQ ID NO: 20735 - DNA, 23 bp, Artificial Sequence
  Synthetic
ccgttttttttttttcaagatcg

SEQ ID NO: 20736 - DNA, 23 bp, Artificial Sequence
  Synthetic
ccgttttttttttttacagctag

SEQ ID NO: 20737 - DNA, 23 bp, Artificial Sequence
  Synthetic
ccgttttttttttttcggttatc

SEQ ID NO: 20738 - DNA, 23 bp, Artificial Sequence
  Synthetic
ccgttttttttttttacagctag

SEQ ID NO: 20739 - DNA, 23 bp, Artificial Sequence
  Synthetic
ccgttttttttttttgttcggtt

SEQ ID NO: 20740 - DNA, 23 bp, Artificial Sequence
  Synthetic
ccgttttttttttttctcactct

SEQ ID NO: 20741 - DNA, 23 bp, Artificial Sequence
  Synthetic
ccgttttttttttttctcactct

SEQ ID NO: 20742 - DNA, 23 bp, Artificial Sequence
  Synthetic
ccgttttttttttttctcactct

SEQ ID NO: 20743 - DNA, 23 bp, Artificial Sequence
  Synthetic
ccgttttttttttttctcactct

SEQ ID NO: 20744 - DNA, 23 bp, Artificial Sequence
  Synthetic
ccgttttttttttttctcactct

SEQ ID NO: 20745 - DNA, 23 bp, Artificial Sequence
  Synthetic
ccgttttttttttttctcactct

SEQ ID NO: 20746 - DNA, 23 bp, Artificial Sequence
  Synthetic
ccgttttttttttttctcactct

SEQ ID NO: 20747 - DNA, 23 bp, Artificial Sequence
  Synthetic
ccgttttttttttttctcactct

SEQ ID NO: 20748 - DNA, 23 bp, Artificial Sequence
  Synthetic
ccgttttttttttttctcactct

SEQ ID NO: 20749 - DNA, 23 bp, Artificial Sequence
  Synthetic
ccgttttttttttttctctctct

SEQ ID NO: 20750 - DNA, 23 bp, Artificial Sequence
  Synthetic
ccgttttttttttttctcgctct

SEQ ID NO: 20751 - DNA, 23 bp, Artificial Sequence
  Synthetic
ccgttttttttttttgagctccc

SEQ ID NO: 20752 - DNA, 23 bp, Artificial Sequence
  Synthetic
ccgttttttttttttgagctccc

SEQ ID NO: 20753 - DNA, 23 bp, Artificial Sequence
  Synthetic
ccgttttttttttttgagctccc

SEQ ID NO: 20754 - DNA, 23 bp, Artificial Sequence
  Synthetic
ccgttttttttttttgagctccc

SEQ ID NO: 20755 - DNA, 23 bp, Artificial Sequence
  Synthetic
ccgttttttttttttcatacagg

SEQ ID NO: 20756 - DNA, 23 bp, Artificial Sequence
  Synthetic
ccgttttttttttttcatacagg

SEQ ID NO: 20757 - DNA, 23 bp, Artificial Sequence
  Synthetic
ccgttttttttttttcatacagg

SEQ ID NO: 20758 - DNA, 23 bp, Artificial Sequence
  Synthetic
ccgttttttttttttcatacagg

SEQ ID NO: 20759 - DNA, 23 bp, Artificial Sequence
  Synthetic
ccgttttttttttttcatacagg

SEQ ID NO: 20760 - DNA, 23 bp, Artificial Sequence
  Synthetic
ccgttttttttttttgcatacag

SEQ ID NO: 20761 - DNA, 23 bp, Artificial Sequence
  Synthetic
ccgttttttttttttatgcagag

SEQ ID NO: 20762 - DNA, 23 bp, Artificial Sequence
  Synthetic
ccgttttttttttttacgtgccc

SEQ ID NO: 20763 - DNA, 23 bp, Artificial Sequence
  Synthetic
ccgttttttttttttacgtgccc

SEQ ID NO: 20764 - DNA, 23 bp, Artificial Sequence
  Synthetic
ccgttttttttttttacgtgccc

SEQ ID NO: 20765 - DNA, 23 bp, Artificial Sequence
  Synthetic
ccgttttttttttttacgtgccc

SEQ ID NO: 20766 - DNA, 23 bp, Artificial Sequence
  Synthetic
ccgttttttttttttggaatgaa

SEQ ID NO: 20767 - DNA, 23 bp, Artificial Sequence
  Synthetic
ccgttttttttttttgaatgaag

SEQ ID NO: 20768 - DNA, 23 bp, Artificial Sequence
  Synthetic
ccgttttttttttttgaatgaag

SEQ ID NO: 20769 - DNA, 23 bp, Artificial Sequence
  Synthetic
ccgttttttttttttgaatgaag

SEQ ID NO: 20770 - DNA, 23 bp, Artificial Sequence
  Synthetic
ccgttttttttttttgaatgaag

SEQ ID NO: 20771 - DNA, 23 bp, Artificial Sequence
  Synthetic
ccgttttttttttttgaatgaag

SEQ ID NO: 20772 - DNA, 23 bp, Artificial Sequence
  Synthetic
ccgttttttttttttgaatgaag

SEQ ID NO: 20773 - DNA, 23 bp, Artificial Sequence
  Synthetic
ccgttttttttttttgaatgaag

SEQ ID NO: 20774 - DNA, 23 bp, Artificial Sequence
  Synthetic
ccgttttttttttttgaatgaag

SEQ ID NO: 20775 - DNA, 23 bp, Artificial Sequence
  Synthetic
ccgttttttttttttggattgaa

SEQ ID NO: 20776 - DNA, 23 bp, Artificial Sequence
  Synthetic
ccgttttttttttttggattgaa

SEQ ID NO: 20777 - DNA, 23 bp, Artificial Sequence
  Synthetic
ccgttttttttttttggaatgaa

SEQ ID NO: 20778 - DNA, 23 bp, Artificial Sequence
  Synthetic
ccgttttttttttttggaatgaa

SEQ ID NO: 20779 - DNA, 23 bp, Artificial Sequence
  Synthetic
ccgttttttttttttatcatgct

SEQ ID NO: 20780 - DNA, 23 bp, Artificial Sequence
  Synthetic
ccgttttttttttttatcatgct

SEQ ID NO: 20781 - DNA, 23 bp, Artificial Sequence
  Synthetic
ccgttttttttttttatcatgct

SEQ ID NO: 20782 - DNA, 23 bp, Artificial Sequence
  Synthetic
ccgttttttttttttatcatgct

SEQ ID NO: 20783 - DNA, 23 bp, Artificial Sequence
  Synthetic
ccgttttttttttttgatcatgc

SEQ ID NO: 20784 - DNA, 23 bp, Artificial Sequence
  Synthetic
ccgttttttttttttgatcatgc

SEQ ID NO: 20785 - DNA, 23 bp, Artificial Sequence
  Synthetic
ccgttttttttttttgatcatgc

SEQ ID NO: 20786 - DNA, 23 bp, Artificial Sequence
  Synthetic
ccgttttttttttttgatcatgc

SEQ ID NO: 20787 - DNA, 23 bp, Artificial Sequence
  Synthetic
ccgttttttttttttgatcatgc

SEQ ID NO: 20788 - DNA, 23 bp, Artificial Sequence
  Synthetic
ccgttttttttttttccgatctg

SEQ ID NO: 20789 - DNA, 23 bp, Artificial Sequence
  Synthetic
ccgttttttttttttccgatctg

SEQ ID NO: 20790 - DNA, 23 bp, Artificial Sequence
  Synthetic
ccgttttttttttttgcaagtca

SEQ ID NO: 20791 - DNA, 23 bp, Artificial Sequence
  Synthetic
ccgttttttttttttgcaagtca

SEQ ID NO: 20792 - DNA, 23 bp, Artificial Sequence
  Synthetic
ccgttttttttttttggcaagtc

SEQ ID NO: 20793 - DNA, 23 bp, Artificial Sequence
  Synthetic
ccgttttttttttttaggcagtc

SEQ ID NO: 20794 - DNA, 23 bp, Artificial Sequence
  Synthetic
ccgttttttttttttaggcagtc

SEQ ID NO: 20795 - DNA, 23 bp, Artificial Sequence
  Synthetic
ccgttttttttttttgcaagtca

SEQ ID NO: 20796 - DNA, 23 bp, Artificial Sequence
  Synthetic
ccgttttttttttttgcaagtca

SEQ ID NO: 20797 - DNA, 23 bp, Artificial Sequence
  Synthetic
ccgttttttttttttgcaagtca

SEQ ID NO: 20798 - DNA, 23 bp, Artificial Sequence
  Synthetic
ccgttttttttttttggcaagtc

SEQ ID NO: 20799 - DNA, 23 bp, Artificial Sequence
  Synthetic
ccgttttttttttttggcaagtc

SEQ ID NO: 20800 - DNA, 23 bp, Artificial Sequence
  Synthetic
ccgttttttttttttggcaagtc

SEQ ID NO: 20801 - DNA, 23 bp, Artificial Sequence
  Synthetic
ccgttttttttttttggcgcggc

SEQ ID NO: 20802 - DNA, 23 bp, Artificial Sequence
  Synthetic
ccgttttttttttttatattggc

SEQ ID NO: 20803 - DNA, 23 bp, Artificial Sequence
  Synthetic
ccgttttttttttttattggcac

SEQ ID NO: 20804 - DNA, 23 bp, Artificial Sequence
  Synthetic
ccgttttttttttttattggcac

SEQ ID NO: 20805 - DNA, 23 bp, Artificial Sequence
  Synthetic
ccgttttttttttttattggcac

SEQ ID NO: 20806 - DNA, 23 bp, Artificial Sequence
  Synthetic
ccgttttttttttttatattggc

SEQ ID NO: 20807 - DNA, 23 bp, Artificial Sequence
  Synthetic
ccgttttttttttttattggctc

SEQ ID NO: 20808 - DNA, 23 bp, Artificial Sequence
  Synthetic
ccgttttttttttttgatattgg

SEQ ID NO: 20809 - DNA, 23 bp, Artificial Sequence
  Synthetic
ccgttttttttttttattggcac

SEQ ID NO: 20810 - DNA, 23 bp, Artificial Sequence
  Synthetic
ccgttttttttttttattggcac

SEQ ID NO: 20811 - DNA, 23 bp, Artificial Sequence
  Synthetic
ccgttttttttttttgatattgg

SEQ ID NO: 20812 - DNA, 23 bp, Artificial Sequence
  Synthetic
ccgttttttttttttagcatcat

SEQ ID NO: 20813 - DNA, 23 bp, Artificial Sequence
  Synthetic
ccgttttttttttttagcatcat

SEQ ID NO: 20814 - DNA, 23 bp, Artificial Sequence
  Synthetic
ccgttttttttttttagcatcat

SEQ ID NO: 20815 - DNA, 23 bp, Artificial Sequence
  Synthetic
ccgttttttttttttagcatcat

SEQ ID NO: 20816 - DNA, 23 bp, Artificial Sequence
  Synthetic
ccgttttttttttttcagcatca

SEQ ID NO: 20817 - DNA, 23 bp, Artificial Sequence
  Synthetic
ccgttttttttttttgagcaccc

SEQ ID NO: 20818 - DNA, 23 bp, Artificial Sequence
  Synthetic
ccgttttttttttttgagcaccc

SEQ ID NO: 20819 - DNA, 23 bp, Artificial Sequence
  Synthetic
ccgttttttttttttgagcaccc

SEQ ID NO: 20820 - DNA, 23 bp, Artificial Sequence
  Synthetic
ccgttttttttttttgagcaccc

SEQ ID NO: 20821 - DNA, 23 bp, Artificial Sequence
  Synthetic
ccgttttttttttttatcaatgc

SEQ ID NO: 20822 - DNA, 23 bp, Artificial Sequence
  Synthetic
ccgttttttttttttaggtggac

SEQ ID NO: 20823 - DNA, 23 bp, Artificial Sequence
  Synthetic
ccgttttttttttttaggtggac

SEQ ID NO: 20824 - DNA, 23 bp, Artificial Sequence
  Synthetic
ccgttttttttttttgttccccc

SEQ ID NO: 20825 - DNA, 23 bp, Artificial Sequence
  Synthetic
ccgttttttttttttgttccccc

SEQ ID NO: 20826 - DNA, 23 bp, Artificial Sequence
  Synthetic
ccgttttttttttttgttcctcc

SEQ ID NO: 20827 - DNA, 23 bp, Artificial Sequence
  Synthetic
ccgttttttttttttgttcaaga

SEQ ID NO: 20828 - DNA, 23 bp, Artificial Sequence
  Synthetic
ccgttttttttttttgttcaaga

SEQ ID NO: 20829 - DNA, 23 bp, Artificial Sequence
  Synthetic
ccgttttttttttttgggcaatt

SEQ ID NO: 20830 - DNA, 23 bp, Artificial Sequence
  Synthetic
ccgttttttttttttggacagct

SEQ ID NO: 20831 - DNA, 23 bp, Artificial Sequence
  Synthetic
ccgttttttttttttgggcaatt

SEQ ID NO: 20832 - DNA, 23 bp, Artificial Sequence
  Synthetic
ccgttttttttttttgggcagct

SEQ ID NO: 20833 - DNA, 23 bp, Artificial Sequence
  Synthetic
ccgttttttttttttgggcaact

SEQ ID NO: 20834 - DNA, 23 bp, Artificial Sequence
  Synthetic
ccgttttttttttttgggcaaat

SEQ ID NO: 20835 - DNA, 23 bp, Artificial Sequence
  Synthetic
ccgttttttttttttcagggaag

SEQ ID NO: 20836 - DNA, 46 bp, Artificial Sequence
  Synthetic
  misc_feature (46)..(46): n is a, c, g or t
  misc_feature (45)..(45): v is a, c or g
gcgagcacagaattaatacgactcactacccgttttttttttttvn

SEQ ID NO: 20837 - DNA, 46 bp, Artificial Sequence
  Synthetic
  misc_feature (46)..(46): n is a, c, g or t
  misc_feature (45)..(45): v is a, c or g
gcgagcacagaattaatacgactcactatcggttttttttttttvn

SEQ ID NO: 20838 - DNA, 14 bp, Artificial Sequence
  Synthetic
acactccagctggg

SEQ ID NO: 20839 - DNA, 12 bp, Artificial Sequence
  Synthetic
cagtcatttggg

SEQ ID NO: 20840 - RNA, 22 nt, Homo sapiens
ugagguaguagguuguauaguu

SEQ ID NO: 20841 - RNA, 22 nt, Homo sapiens
ugagguaguagguuguaugguu

SEQ ID NO: 20842 - RNA, 21 nt, Homo sapiens
agagguaguagguugcauagu

SEQ ID NO: 20843 - RNA, 22 nt, Homo sapiens
aacccguagauccgaucuugug

SEQ ID NO: 20844 - RNA, 22 nt, Homo sapiens
aacccguagauccgaacuugug

SEQ ID NO: 20845 - DNA, 15 bp, Artificial Sequence
  Synthetic
ccgtttttttttttt

SEQ ID NO: 20846 - DNA, 23 bp, Artificial Sequence
  Synthetic
ccgttttttttttttaactatac

SEQ ID NO: 20847 - DNA, 23 bp, Artificial Sequence
  Synthetic
ccgttttttttttttactataca

SEQ ID NO: 20848 - DNA, 23 bp, Artificial Sequence
  Synthetic
ccgttttttttttttctatacaa

SEQ ID NO: 20849 - RNA, 23 nt, Homo sapiens
ugauugguacgucuguggguaga

SEQ ID NO: 20850 - DNA, 23 bp, Artificial Sequence
  Synthetic
ccgttttttttttttctacccac

SEQ ID NO: 20851 - DNA, 23 bp, Artificial Sequence
  Synthetic
ccgttttttttttttacccacag

SEQ ID NO: 20852 - DNA, 23 bp, Artificial Sequence
  Synthetic
ccgttttttttttttcccacaga

SEQ ID NO: 20853 - DNA, 44 bp, Artificial Sequence
  Synthetic
  misc_feature (44)..(44): n is a, c, g or t
  misc_feature (43)..(43): v is a, c or g
gcgagcacagaattaatacgactcactacccgttttttttttvn

SEQ ID NO: 20854 - DNA, 46 bp, Artificial Sequence
  Synthetic
  misc_feature (46)..(46): n is a, c, g or t
  misc_feature (45)..(45): v is a, c or g
gcgagcacagaattaatacgactcactatccgttttttttttttvn

SEQ ID NO: 20855 - DNA, 46 bp, Artificial Sequence
  Synthetic
  misc_feature (46)..(46): n is a, c, g or t
  misc_feature (45)..(45): v is a, c or g
gcgagcacagaattaatacgactcactatcccttttttttttttvn

SEQ ID NO: 20856 - DNA, 46 bp, Artificial Sequence
  Synthetic
  misc_feature (46)..(46): n is a, c, g or t
  misc_feature (45)..(45): v is a, c or g
gcgagcacagaattaatacgactcactatccgtttttattttttvn

SEQ ID NO: 20857 - DNA, 46 bp, Artificial Sequence
  Synthetic
  misc_feature (46)..(46): n is a, c, g or t
  misc_feature (45)..(45): v is a, c or g
gcgagcacagaattaatacgactcactataggttttttttttttvn

SEQ ID NO: 20858 - DNA, 46 bp, Artificial Sequence
  Synthetic
  misc_feature (46)..(46): n is a, c, g or t
  misc_feature (45)..(45): v is a, c or g
gcgagcacagaattaatacgactcactatccgatttttttttttvn

SEQ ID NO: 20859 - DNA, 22 bp, Artificial Sequence
  Synthetic
gcgagcacagaattaatacgac

SEQ ID NO: 20860 - DNA, 21 bp, Artificial Sequence
  Synthetic
ccgttttttttttaactatac

SEQ ID NO: 20861 - DNA, 21 bp, Artificial Sequence
  Synthetic
ccgttttttttttaaccatac

SEQ ID NO: 20862 - DNA, 44 bp, Artificial Sequence
  Synthetic
  misc_feature (44)..(44): n is a, c, g or t
  misc_feature (43)..(43): v is a, c or g
gcgagcacagaattaatacgactcactatcggttttttttttvn

SEQ ID NO: 20863 - DNA, 21 bp, Homo sapiens
tggaatgtaaagaagtatgta

SEQ ID NO: 20864 - DNA, 22 bp, Homo sapiens
aacccgtagatccgaacttgtg

SEQ ID NO: 20865 - DNA, 22 bp, Homo sapiens
tacagtactgtgataactgaag

SEQ ID NO: 20866 - DNA, 23 bp, Homo sapiens
agcagcattgtacagggctatga

SEQ ID NO: 20867 - DNA, 20 bp, Homo sapiens
tcaaatgctcagactcctgt

SEQ ID NO: 20868 - DNA, 24 bp, Homo sapiens
aaaagtgcttacagtgcaggtagc

SEQ ID NO: 20869 - DNA, 21 bp, Homo sapiens
taaagtgctgacagtgcagat

SEQ ID NO: 20870 - DNA, 23 bp, Homo sapiens
agcagcattgtacagggctatca

SEQ ID NO: 20871 - DNA, 23 bp, Homo sapiens
taccctgtagatccgaatttgtg

SEQ ID NO: 20872 - DNA, 22 bp, Homo sapiens
taccctgtagaaccgaatttgt

SEQ ID NO: 20873 - DNA, 23 bp, Homo sapiens
tggagtgtgacaatggtgtttgt

SEQ ID NO: 20874 - DNA, 22 bp, Homo sapiens
ttaaggcacgcggtgaatgcca

SEQ ID NO: 20875 - DNA, 23 bp, Homo sapiens
tccctgagaccctttaacctgtg

SEQ ID NO: 20876 - DNA, 22 bp, Homo sapiens
tccctgagaccctaacttgtga

SEQ ID NO: 20877 - DNA, 21 bp, Homo sapiens
cattattacttttggtacgcg

SEQ ID NO: 20878 - DNA, 21 bp, Homo sapiens
tcgtaccgtgagtaataatgc

SEQ ID NO: 20879 - DNA, 22 bp, Homo sapiens
tcacagtgaaccggtctctttt

SEQ ID NO: 20880 - DNA, 22 bp, Homo sapiens
tcacagtgaaccggtctctttc

SEQ ID NO: 20881 - DNA, 21 bp, Homo sapiens
ctttttgcggtctgggcttgc

SEQ ID NO: 20882 - DNA, 22 bp, Homo sapiens
cagtgcaatgttaaaagggcat

SEQ ID NO: 20883 - DNA, 22 bp, Homo sapiens
cagtgcaatgatgaaagggcat

SEQ ID NO: 20884 - DNA, 22 bp, Homo sapiens
taacagtctacagccatggtcg

SEQ ID NO: 20885 - DNA, 22 bp, Homo sapiens
ttggtccccttcaaccagctgt

SEQ ID NO: 20886 - DNA, 21 bp, Homo sapiens
ttggtccccttcaaccagcta

SEQ ID NO: 20887 - DNA, 21 bp, Homo sapiens
tgtgactggttgaccagaggg

SEQ ID NO: 20888 - DNA, 23 bp, Homo sapiens
tatggctttttattcctatgtga

SEQ ID NO: 20889 - DNA, 22 bp, Homo sapiens
tatggcttttcattcctatgtg

SEQ ID NO: 20890 - DNA, 23 bp, Homo sapiens
actccatttgttttgatgatgga

SEQ ID NO: 20891 - DNA, 22 bp, Homo sapiens
tattgcttaagaatacgcgtag

SEQ ID NO: 20892 - DNA, 17 bp, Homo sapiens
agctggtgttgtgaatc

SEQ ID NO: 20893 - DNA, 18 bp, Homo sapiens
tctacagtgcacgtgtct

SEQ ID NO: 20894 - DNA, 21 bp, Homo sapiens
agtggttttaccctatggtag

SEQ ID NO: 20895 - DNA, 22 bp, Homo sapiens
taacactgtctggtaaagatgg

SEQ ID NO: 20896 - DNA, 23 bp, Homo sapiens
tgtagtgtttcctactttatgga

SEQ ID NO: 20897 - DNA, 20 bp, Homo sapiens
cataaagtagaaagcactac

SEQ ID NO: 20898 - DNA, 22 bp, Homo sapiens
tgagatgaagcactgtagctca

SEQ ID NO: 20899 - DNA, 22 bp, Homo sapiens
tacagtatagatgatgtactag

SEQ ID NO: 20900 - DNA, 24 bp, Homo sapiens
gtccagttttcccaggaatccctt

SEQ ID NO: 20901 - DNA, 22 bp, Homo sapiens
tgagaactgaattccatgggtt

SEQ ID NO: 20902 - DNA, 22 bp, Homo sapiens
tgagaactgaattccataggct

SEQ ID NO: 20903 - DNA, 20 bp, Homo sapiens
gtgtgtggaaatgcttctgc

SEQ ID NO: 20904 - DNA, 22 bp, Homo sapiens
tcagtgcactacagaactttgt

SEQ ID NO: 20905 - DNA, 22 bp, Homo sapiens
tcagtgcatcacagaactttgt

SEQ ID NO: 20906 - DNA, 22 bp, Homo sapiens
tctggctccgtgtcttcactcc

SEQ ID NO: 20907 - DNA, 22 bp, Homo sapiens
tctcccaacccttgtaccagtg

SEQ ID NO: 20908 - DNA, 22 bp, Homo sapiens
actagactgaagctccttgagg

SEQ ID NO: 20909 - DNA, 22 bp, Homo sapiens
tcagtgcatgacagaacttggg

SEQ ID NO: 20910 - DNA, 20 bp, Homo sapiens
ttgcatagtcacaaaagtga

SEQ ID NO: 20911 - DNA, 22 bp, Homo sapiens
aatcatacacggttgacctatt

SEQ ID NO: 20912 - DNA, 22 bp, Homo sapiens
taggttatccgtgttgccttcg

SEQ ID NO: 20913 - DNA, 22 bp, Homo sapiens
ttaatgctaatcgtgatagggg

SEQ ID NO: 20914 - DNA, 22 bp, Homo sapiens
tagcagcacataatggtttgtg

SEQ ID NO: 20915 - DNA, 22 bp, Homo sapiens
tagcagcacatcatggtttaca

SEQ ID NO: 20916 - DNA, 22 bp, Homo sapiens
tagcagcacgtaaatattggcg

SEQ ID NO: 20917 - DNA, 20 bp, Homo sapiens
actgcagtgaaggcacttgt

SEQ ID NO: 20918 - DNA, 24 bp, Homo sapiens
caaagtgcttacagtgcaggtagt

SEQ ID NO: 20919 - DNA, 23 bp, Homo sapiens
aacattcaacgctgtcggtgagt

SEQ ID NO: 20920 - DNA, 22 bp, Homo sapiens
aacattcattgctgtcggtggg

SEQ ID NO: 20921 - DNA, 22 bp, Homo sapiens
aacattcaacctgtcggtgagt

SEQ ID NO: 20922 - DNA, 24 bp, Homo sapiens
aacattcattgttgtcggtgggtt

SEQ ID NO: 20923 - DNA, 21 bp, Homo sapiens
tggttctagacttgccaacta

SEQ ID NO: 20924 - DNA, 22 bp, Homo sapiens
tttggcaatggtagaactcaca

SEQ ID NO: 20925 - DNA, 23 bp, Homo sapiens
tatggcactggtagaattcactg

SEQ ID NO: 20926 - DNA, 39 bp, Homo sapiens
tcagaacgtgacaatcagcactagctattgcttgctatt

SEQ ID NO: 20927 - DNA, 38 bp, Homo sapiens
cagtgaagcaatggcaatactagctattgcttgctatt

SEQ ID NO: 20928 - DNA, 39 bp, Homo sapiens
tgcatcagcgatcttggtggttagctattgcttgctatt

SEQ ID NO: 20929 - DNA, 39 bp, Homo sapiens
cttcacttactgtcagtagcatagctattgcttgctatt

SEQ ID NO: 20930 - DNA, 40 bp, Homo sapiens
gaatttgcgtgtcatccttgcgtagctattgcttgctatt

SEQ ID NO: 20931 - DNA, 39 bp, Homo sapiens
gaaccacctcagtagtgtctgtagctattgcttgctatt

SEQ ID NO: 20932 - DNA, 39 bp, Homo sapiens
ggtcagagcgctgcggtgatgtagctattgcttgctatt

SEQ ID NO: 20933 - DNA, 39 bp, Homo sapiens
agaccttcatgttcagtcagctagctattgcttgctatt

SEQ ID NO: 20934 - DNA, 39 bp, Homo sapiens
gctagcgctgcgttcttcatctagctattgcttgctatt

SEQ ID NO: 20935 - DNA, 40 bp, Homo sapiens
gcttccgagatcagacgagatctagctattgcttgctatt

SEQ ID NO: 20936 - DNA, 41 bp, Homo sapiens
tctgtatcgttccaatttaatgctagctattgcttgctatt

SEQ ID NO: 20937 - DNA, 39 bp, Homo sapiens
gcgtgtcatccttgcgaatgctagctattgcttgctatt

SEQ ID NO: 20938 - DNA, 44 bp, Artificial Sequence
  Synthetic
tattatgcgcgtagcgtaccgaatgctagctattgcttgctatt

SEQ ID NO: 20939 - DNA, 44 bp, Artificial Sequence
  Synthetic
cgcgcataatatcggtacgctaatgctagctattgcttgctatt

SEQ ID NO: 20940 - DNA, 44 bp, Artificial Sequence
  Synthetic
cgaatcgcgtatattatgcgcgatgctagctattgcttgctatt

SEQ ID NO: 20941 - DNA, 44 bp, Artificial Sequence
  Synthetic
ttacgcgtacctatatcgacccatgctagctattgcttgctatt

SEQ ID NO: 20942 - DNA, 44 bp, Artificial Sequence
  Synthetic
cgtcgactatctatatcgacccatgctagctattgcttgctatt

SEQ ID NO: 20943 - DNA, 44 bp, Artificial Sequence
  Synthetic
tatcgcgaactcgccctataacatgctagctattgcttgctatt

SEQ ID NO: 20944 - DNA, 44 bp, Artificial Sequence
  Synthetic
atataagttcgtataactatcgatgctagctattgcttgctatt

SEQ ID NO: 20945 - DNA, 44 bp, Artificial Sequence
  Synthetic
cgattagtatacgaacttatatatgctagctattgcttgctatt

SEQ ID NO: 20946 - DNA, 44 bp, Artificial Sequence
  Synthetic
cgtttcgtacgtcgtcgattcgatgctagctattgcttgctatt

SEQ ID NO: 20947 - DNA, 44 bp, Artificial Sequence
  Synthetic
cgaatcgacgacgcgcataataatgctagctattgcttgctatt

SEQ ID NO: 20948 - DNA, 44 bp, Artificial Sequence
  Synthetic
ttagtatcgaatactaatcgatatgctagctattgcttgctatt

SEQ ID NO: 20949 - DNA, 44 bp, Artificial Sequence; identical to SEQ ID NO: 20945
  Synthetic

SEQ ID NO: 20950 - DNA, 44 bp, Artificial Sequence; identical to SEQ ID NO: 20944
  Synthetic

SEQ ID NO: 20951 - DNA, 44 bp, Artificial Sequence
  Synthetic
ttagtatcgaattcgatactaaatgctagctattgcttgctatt

SEQ ID NO: 20952 - DNA, 25 bp, Artificial Sequence
  Synthetic
gcaatgctagctattgcttgctatt

SEQ ID NO: 20953 - DNA, 24 bp, Artificial Sequence
  Synthetic
gcaatgctagctattgcttgctat

SEQ ID NO: 20954 - DNA, 23 bp, Artificial Sequence
  Synthetic
gcaatgctagctattgcttgcta

SEQ ID NO: 20955 - DNA, 22 bp, Artificial Sequence
  Synthetic
gcaatgctagctattgcttgct

SEQ ID NO: 20956 - DNA, 21 bp, Artificial Sequence
  Synthetic
gcaatgctagctattgcttgc

SEQ ID NO: 20957 - DNA, 20 bp, Artificial Sequence
  Synthetic
gcaatgctagctattgcttg

SEQ ID NO: 20958 - DNA, 19 bp, Artificial Sequence
  Synthetic
gcaatgctagctattgctt

SEQ ID NO: 20959 - DNA, 18 bp, Artificial Sequence
  Synthetic
gcaatgctagctattgct

SEQ ID NO: 20960 - DNA, 17 bp, Artificial Sequence
  Synthetic
gcaatgctagctattgc

SEQ ID NO: 20961 - DNA, 16 bp, Artificial Sequence
  Synthetic
gcaatgctagctattg

SEQ ID NO: 20962 - DNA, 15 bp, Artificial Sequence
  Synthetic
gcaatgctagctatt

SEQ ID NO: 20963 - DNA, 14 bp, Artificial Sequence
  Synthetic
gcaatgctagctat

SEQ ID NO: 20964 - DNA, 13 bp, Artificial Sequence
  Synthetic
gcaatgctagcta

SEQ ID NO: 20965 - DNA, 12 bp, Artificial Sequence
  Synthetic
gcaatgctagct

SEQ ID NO: 20966 - DNA, 11 bp, Artificial Sequence
  Synthetic
gcaatgctagc

SEQ ID NO: 20967 - DNA, 10 bp, Artificial Sequence
  Synthetic
gcaatgctag

SEQ ID NO: 20968 - DNA, 9 bp, Artificial Sequence
  Synthetic
gcaatgcta

SEQ ID NO: 20969 - DNA, 8 bp, Artificial Sequence
  Synthetic
gcaatgct

SEQ ID NO: 20970 - DNA, 7 bp, Artificial Sequence
  Synthetic
gcaatgc

SEQ ID NO: 20971 - DNA, 6 bp, Artificial Sequence
  Synthetic
gcaatg

SEQ ID NO: 20972 - DNA, 5 bp, Artificial Sequence
  Synthetic
gcaat

SEQ ID NO: 20973 - DNA, 60 bp, Artificial Sequence
  Synthetic
tatcctactatacgtatcacatagcgttccgtatgtggccgggatagacctagcttaagc

SEQ ID NO: 20974 - DNA, 59 bp, Artificial Sequence
  Synthetic
tatcctactatacgtatcacatagcgttccgtatgtggccgggatagacctagcttaag

SEQ ID NO: 20975 - DNA, 58 bp, Artificial Sequence
  Synthetic
tatcctactatacgtatcacatagcgttccgtatgtggccgggatagacctagcttaa

SEQ ID NO: 20976 - DNA, 57 bp, Artificial Sequence
  Synthetic
tatcctactatacgtatcacatagcgttccgtatgtggccgggatagacctagctta

SEQ ID NO: 20977 - DNA, 56 bp, Artificial Sequence
  Synthetic
tatcctactatacgtatcacatagcgttccgtatgtggccgggatagacctagctt

SEQ ID NO: 20978 - DNA, 55 bp, Artificial Sequence
  Synthetic
tatcctactatacgtatcacatagcgttccgtatgtggccgggatagacctagct

SEQ ID NO: 20979 - DNA, 54 bp, Artificial Sequence
  Synthetic
tatcctactatacgtatcacatagcgttccgtatgtggccgggatagacctagc

SEQ ID NO: 20980 - DNA, 53 bp, Artificial Sequence
  Synthetic
tatcctactatacgtatcacatagcgttccgtatgtggccgggatagacctag

SEQ ID NO: 20981 - DNA, 52 bp, Artificial Sequence
  Synthetic
tatcctactatacgtatcacatagcgttccgtatgtggccgggatagaccta

SEQ ID NO: 20982 - DNA, 51 bp, Artificial Sequence
  Synthetic
tatcctactatacgtatcacatagcgttccgtatgtggccgggatagacct

SEQ ID NO: 20983 - DNA, 50 bp, Artificial Sequence
  Synthetic
tatcctactatacgtatcacatagcgttccgtatgtggccgggatagacc

SEQ ID NO: 20984 - DNA, 49 bp, Artificial Sequence
  Synthetic
tatcctactatacgtatcacatagcgttccgtatgtggccgggatagac

SEQ ID NO: 20985 - DNA, 48 bp, Artificial Sequence
  Synthetic
tatcctactatacgtatcacatagcgttccgtatgtggccgggataga

SEQ ID NO: 20986 - DNA, 47 bp, Artificial Sequence
  Synthetic
tatcctactatacgtatcacatagcgttccgtatgtggccgggatag

SEQ ID NO: 20987 - DNA, 46 bp, Artificial Sequence
  Synthetic
tatcctactatacgtatcacatagcgttccgtatgtggccgggata

SEQ ID NO: 20988 - DNA, 45 bp, Artificial Sequence
  Synthetic
tatcctactatacgtatcacatagcgttccgtatgtggccgggat

SEQ ID NO: 20989 - DNA, 44 bp, Artificial Sequence
  Synthetic
tatcctactatacgtatcacatagcgttccgtatgtggccggga

SEQ ID NO: 20990 - DNA, 43 bp, Artificial Sequence
  Synthetic
tatcctactatacgtatcacatagcgttccgtatgtggccggg

SEQ ID NO: 20991 - DNA, 42 bp, Artificial Sequence
  Synthetic
tatcctactatacgtatcacatagcgttccgtatgtggccgg

SEQ ID NO: 20992 - DNA, 41 bp, Artificial Sequence
  Synthetic
tatcctactatacgtatcacatagcgttccgtatgtggccg

SEQ ID NO: 20993 - DNA, 40 bp, Artificial Sequence
  Synthetic
tatcctactatacgtatcacatagcgttccgtatgtggcc

SEQ ID NO: 20994 - DNA, 39 bp, Artificial Sequence
  Synthetic
tatcctactatacgtatcacatagcgttccgtatgtggc

SEQ ID NO: 20995 - DNA, 38 bp, Artificial Sequence
  Synthetic
tatcctactatacgtatcacatagcgttccgtatgtgg

SEQ ID NO: 20996 - DNA, 37 bp, Artificial Sequence
  Synthetic
tatcctactatacgtatcacatagcgttccgtatgtg

SEQ ID NO: 20997 - DNA, 36 bp, Artificial Sequence
  Synthetic
tatcctactatacgtatcacatagcgttccgtatgt

SEQ ID NO: 20998 - DNA, 35 bp, Artificial Sequence
  Synthetic
tatcctactatacgtatcacatagcgttccgtatg

SEQ ID NO: 20999 - DNA, 34 bp, Artificial Sequence
  Synthetic
tatcctactatacgtatcacatagcgttccgtat

SEQ ID NO: 21000 - DNA, 33 bp, Artificial Sequence
  Synthetic
tatcctactatacgtatcacatagcgttccgta

SEQ ID NO: 21001 - DNA, 32 bp, Artificial Sequence
  Synthetic
tatcctactatacgtatcacatagcgttccgt

SEQ ID NO: 21002 - DNA, 31 bp, Artificial Sequence
  Synthetic
tatcctactatacgtatcacatagcgttccg

SEQ ID NO: 21003 - DNA, 30 bp, Artificial Sequence
  Synthetic
tatcctactatacgtatcacatagcgttcc

SEQ ID NO: 21004 - DNA, 29 bp, Artificial Sequence
  Synthetic
tatcctactatacgtatcacatagcgttc

SEQ ID NO: 21005 - DNA, 28 bp, Artificial Sequence
  Synthetic
tatcctactatacgtatcacatagcgtt

SEQ ID NO: 21006 - DNA, 27 bp, Artificial Sequence
  Synthetic
tatcctactatacgtatcacatagcgt

SEQ ID NO: 21007 - DNA, 26 bp, Artificial Sequence
  Synthetic
tatcctactatacgtatcacatagcg

SEQ ID NO: 21008 - DNA, 25 bp, Artificial Sequence
  Synthetic
tatcctactatacgtatcacatagc

SEQ ID NO: 21009 - DNA, 24 bp, Artificial Sequence
  Synthetic
tatcctactatacgtatcacatag

SEQ ID NO: 21010 - DNA, 23 bp, Artificial Sequence
  Synthetic
tatcctactatacgtatcacata

SEQ ID NO: 21011 - DNA, 22 bp, Artificial Sequence
  Synthetic
tatcctactatacgtatcacat

SEQ ID NO: 21012 - DNA, 21 bp, Artificial Sequence
  Synthetic
tatcctactatacgtatcaca

SEQ ID NO: 21013 - DNA, 20 bp, Artificial Sequence
  Synthetic
tatcctactatacgtatcac

SEQ ID NO: 21014 - DNA, 19 bp, Artificial Sequence
  Synthetic
tatcctactatacgtatca

SEQ ID NO: 21015 - DNA, 18 bp, Artificial Sequence
  Synthetic
tatcctactatacgtatc

SEQ ID NO: 21016 - DNA, 17 bp, Artificial Sequence
  Synthetic
tatcctactatacgtat

SEQ ID NO: 21017 - DNA, 16 bp, Artificial Sequence
  Synthetic
tatcctactatacgta

SEQ ID NO: 21018 - DNA, 15 bp, Artificial Sequence
  Synthetic
tatcctactatacgt

SEQ ID NO: 21019 - DNA, 14 bp, Artificial Sequence
  Synthetic
tatcctactatacg

SEQ ID NO: 21020 - DNA, 13 bp, Artificial Sequence
  Synthetic
tatcctactatac

SEQ ID NO: 21021 - DNA, 11 bp, Artificial Sequence
  Synthetic
tatcctactat

SEQ ID NO: 21022 - DNA, 10 bp, Artificial Sequence
  Synthetic
tatcctacta

SEQ ID NO: 21023 - DNA, 9 bp, Artificial Sequence
  Synthetic
tatcctact

SEQ ID NO: 21024 - DNA, 8 bp, Artificial Sequence
  Synthetic
tatcctac

SEQ ID NO: 21025 - DNA, 7 bp, Artificial Sequence
  Synthetic
tatccta

SEQ ID NO: 21026 - DNA, 6 bp, Artificial Sequence
  Synthetic
tatcct

SEQ ID NO: 21027 - DNA, 5 bp, Artificial Sequence
  Synthetic
tatcc

SEQ ID NO: 21028 - DNA, 40 bp, Artificial Sequence
  Synthetic
cgaacgataacggatcgttacgatcgataacgaacgataa

SEQ ID NO: 21029 - DNA, 39 bp, Artificial Sequence
  Synthetic
cgaacgataacggatcgttacgatcgataacgaacgata

SEQ ID NO: 21030 - DNA, 38 bp, Artificial Sequence
  Synthetic
cgaacgataacggatcgttacgatcgataacgaacgat

SEQ ID NO: 21031 - DNA, 37 bp, Artificial Sequence
  Synthetic
cgaacgataacggatcgttacgatcgataacgaacga

SEQ ID NO: 21032 - DNA, 36 bp, Artificial Sequence
  Synthetic
cgaacgataacggatcgttacgatcgataacgaacg

SEQ ID NO: 21033 - DNA, 35 bp, Artificial Sequence
  Synthetic
cgaacgataacggatcgttacgatcgataacgaac

SEQ ID NO: 21034 - DNA, 34 bp, Artificial Sequence
  Synthetic
cgaacgataacggatcgttacgatcgataacgaa

SEQ ID NO: 21035 - DNA, 33 bp, Artificial Sequence
  Synthetic
cgaacgataacggatcgttacgatcgataacga

SEQ ID NO: 21036 - DNA, 32 bp, Artificial Sequence
  Synthetic
cgaacgataacggatcgttacgatcgataacg

SEQ ID NO: 21037 - DNA, 31 bp, Artificial Sequence
  Synthetic
cgaacgataacggatcgttacgatcgataac

SEQ ID NO: 21038 - DNA, 30 bp, Artificial Sequence
  Synthetic
cgaacgataacggatcgttacgatcgataa

SEQ ID NO: 21039 - DNA, 29 bp, Artificial Sequence
  Synthetic
cgaacgataacggatcgttacgatcgata

SEQ ID NO: 21040 - DNA, 28 bp, Artificial Sequence
  Synthetic
cgaacgataacggatcgttacgatcgat

SEQ ID NO: 21041 - DNA, 27 bp, Artificial Sequence
  Synthetic
cgaacgataacggatcgttacgatcga

SEQ ID NO: 21042 - DNA, 26 bp, Artificial Sequence
  Synthetic
cgaacgataacggatcgttacgatcg

SEQ ID NO: 21043 - DNA, 25 bp, Artificial Sequence
  Synthetic
cgaacgataacggatcgttacgatc

SEQ ID NO: 21044 - DNA, 24 bp, Artificial Sequence
  Synthetic
cgaacgataacggatcgttacgat

SEQ ID NO: 21045 - DNA, 23 bp, Artificial Sequence
  Synthetic
cgaacgataacggatcgttacga

SEQ ID NO: 21046 - DNA, 22 bp, Artificial Sequence
  Synthetic
cgaacgataacggatcgttacg

SEQ ID NO: 21047 - DNA, 21 bp, Artificial Sequence
  Synthetic
cgaacgataacggatcgttac

SEQ ID NO: 21048 - DNA, 20 bp, Artificial Sequence
  Synthetic
cgaacgataacggatcgtta

SEQ ID NO: 21049 - DNA, 19 bp, Artificial Sequence
  Synthetic
cgaacgataacggatcgtt

SEQ ID NO: 21050 - DNA, 18 bp, Artificial Sequence
  Synthetic
cgaacgataacggatcgt

SEQ ID NO: 21051 - DNA, 17 bp, Artificial Sequence
  Synthetic
cgaacgataacggatcg

SEQ ID NO: 21052 - DNA, 16 bp, Artificial Sequence
  Synthetic
cgaacgataacggatc

SEQ ID NO: 21053 - DNA, 15 bp, Artificial Sequence
  Synthetic
cgaacgataacggat

SEQ ID NO: 21054 - DNA, 14 bp, Artificial Sequence
  Synthetic
cgaacgataacgga

SEQ ID NO: 21055 - DNA, 13 bp, Artificial Sequence
  Synthetic
cgaacgataacgg

SEQ ID NO: 21056 - DNA, 12 bp, Artificial Sequence
  Synthetic
cgaacgataacg

SEQ ID NO: 21057 - DNA, 11 bp, Artificial Sequence
  Synthetic
cgaacgataac

SEQ ID NO: 21058 - DNA, 10 bp, Artificial Sequence
  Synthetic
cgaacgataa

SEQ ID NO: 21059 - DNA, 9 bp, Artificial Sequence
  Synthetic
cgaacgata

SEQ ID NO: 21060 - DNA, 8 bp, Artificial Sequence
  Synthetic
cgaacgat

SEQ ID NO: 21061 - DNA, 7 bp, Artificial Sequence
  Synthetic
cgaacga

SEQ ID NO: 21062 - DNA, 6 bp, Artificial Sequence
  Synthetic
cgaacg

SEQ ID NO: 21063 - DNA, 5 bp, Artificial Sequence
  Synthetic
cgaac

1. A method of detecting a target nucleic acid, wherein the target nucleic acid sequence comprises a first portion and second portion, the method comprising:
(a) providing a sample comprising the target nucleic acid; and
(b) contacting the target nucleic acid with a probe, wherein the probe comprises a first portion complementary to the first portion of the target nucleic acid, and wherein the probe comprises a second portion substantially complementary to the second portion of the target nucleic acid,
wherein the level of probe binding to the target nucleic acid compared to a control is indicative of the level of target nucleic acid present in the sample.

2. The method of claim 1, wherein the sample further comprises a sibling nucleic acid, wherein the sibling nucleic acid comprises a first portion and second portion, wherein the first portion of the target nucleic acid and first portion of the sibling nucleic acid are substantially identical, wherein the first portion of the sibling nucleic acid is substantially complementary to the first portion of the probe, and wherein the second portion of the sibling nucleic acid is substantially complementary to the second portion of the probe.

3. The method of claim 1, wherein the target nucleic acid is a RNA.

4. The method of claim 3, wherein the RNA is a miRNA.

5. The method of claim 1, wherein the target nucleic acid is a cDNA.

6. The method of claim 1, wherein the target nucleic acid is amplified.

7. The method of claim 6, wherein amplified is by a polymerase chain reaction comprising forward and reverse primers.

8. The method of claim 7, wherein the forward primer comprises a sequence selected from the group consisting of any one of SEQ ID NOS: 4168-8334.

9. The method of claim 1, wherein the probe comprises a label.

10. The method of claim 9, wherein the label comprises a fluorophore.

11. The method of claim 10, wherein the label further comprises a quencher molecule, and wherein the fluorophore is located on the probe distal to the quencher molecule.

12. The method of claim 1, wherein the probe comprises a sequence selected from the group consisting of any one of SEQ ID NOS: 8335-20835.

13. The method of claim 1, wherein the sample is a biological sample.

14. The method of claim 13, wherein the biological sample is selected from the group consisting of: blood, a blood fraction, urine, ascitic fluid, saliva, cerebrospinal fluid, cervical secretions, vaginal secretions, endometrial secretions, gastrointestinal secretions, bronchial secretions, sputum, pleural effusion, amniotic fluid, secretions from the breast, secretions from ovarian cyst, sperm, cell line and tissue sample.

15. A method for detecting a disease or condition comprising:
(a) providing a sample wherein the sample comprises a target nucleic acid; and
(b) measuring the level of the target nucleic acid in the sample according to claim 1,
wherein a difference in the level of the target nucleic acid compared to a control is indicative of the disease or condition.

16. The method of claim 15, wherein the sample comprises a biological sample, and wherein the biological sample is selected from the group consisting of: blood, a blood fraction, urine, amniotic fluid, ascitic fluid, saliva, cerebrospinal fluid, cervical secretions, vaginal secretions, endometrial secretions, gastrointestinal secretions, bronchial secretions, sputum, pleural effusion, secretions from the breast, secretions from ovarian cyst, sperm, cell line and tissue sample.

17. The method of claim 15, wherein the disease is cancer.

18. A method of detecting a plurality of target nucleic acids, wherein each target nucleic acid sequence comprises a first portion and second portion, the method comprising:
(a) providing a sample comprising the plurality target nucleic acids; and
(b) contacting the target nucleic acids with a plurality of probes, wherein each probe comprises a first portion complementary to the first portion of one of the target nucleic acids, and wherein each probe comprises a second portion substantially complementary to the second portion of one of the target nucleic acids,
wherein the level of each probe binding to each target nucleic acid compared to a control is indicative of the level of each target nucleic acid present in the sample.

19. The method of claim 18, wherein the sample further comprises a plurality of sibling nucleic acids, wherein each sibling nucleic acid comprises a first portion and second portion, and wherein the probe's first portion is substantially complementary to the first portion of the sibling nucleic acid.

20. A method of genotyping comprising the method of claim 18, wherein the sample is DNA isolated from an individual, and wherein the level of each target nucleic acid present in the sample is indicative of the genotype of the individual.

21. A method for identifying microRNA expression in a body-fluid sample obtained from a subject comprising:
(a) providing RNA from said sample, wherein said RNA comprises a microRNA;
(b) generating a reverse transcript of the polyadenylated RNA; and
(c) amplifying the reverse transcript of step (c) by polymerase chain reaction comprising a forward primer, a reverse primer, and a probe.

22. The method of claim 21, wherein the body-fluid sample is selected from the group consisting of: blood, serum, urine, amniotic fluid, ascitic fluid, saliva, cervical secretions, vaginal secretions, effusions, endometrial secretions, gastrointestinal secretions, bronchial secretions, sputum, pleural effusion, secretions from the breast, secretions from ovarian cyst, and sperm.

23. The method of claim 21, wherein said probe further comprises a minor groove binder.

24. The method of claim 21, wherein the forward primer comprises a sequence selected from the group consisting of any one of SEQ ID NOS: 4168-8334.

25. The method of claim 21, wherein the probe comprises a sequence selected from the group consisting of any one of SEQ ID NOS: 8335-20835.

26.-58. (canceled)
